United States Patent Application Publication US 2007/0099251 A1 - sequence listing, part 8

SEQ ID NO: 14647 - DNA, 1144 bp, Homo sapiens
tccactcacagcctgaagcatacccggcaggggctgtccccaggcccaacaagcaaagggcccagtagcgagggccactggagcccatctccggggggctgggcaggaagtagggtggggtttggggtagggatctggtaccctgggactgctgcaactcaaactaaccaacccactgggagaagatgcctgggggtccaggagtcctccaagctctgcctgccaccatcttcctcctcttcctgctgtctgctgtctacctgggccctgggtgccaggccctgtggatgcacaaggtcccagcatcattgatggtgagcctgggggaagacgcccacttccaatgcccgcacaatagcagcaacaacgccaacgtcacctggtggcgcgtcctccatggcaactacacgtggccccctgagttcttgggcccgggcgaggaccccaatgagccgccccccaggcccttcctggacatgggggagggcaccaagaaccgaatcatcacagccgaggggatcatcctcctgttctgcgcggtggtgcctgggacgctgctgctgttcaggaaacgatggcagaacgagaagctcgggttggatgccggggatgaatatgaagatgaaaacctttatgaaggcctgaacctggacgactgctccatgtatgaggacatctcccggggcctccagggcacctaccaggatgtgggcagcctcaacataggagatgtccagctggagaagccgtgacacccctactcctgccaggctgcccccgcctgctgtgcacccagctccagtgtctcagctcacttccctgggacattctcctttcagcccttctgggggcttccttagtcatattcccccagtggggggtgggagggtaacctcactcttctccaggccaggcctccttggactcccctgggggtgtcccactcttcttccctctaaactgccccacctcctaacctaatccccccgccccgctgcctttcccaggctcccctcaccccagcgggtaatgagcccttaatcgctgcctctaggggagctgattgtagcagcctcgttagtgtcaccccctcctccctgatctgtcagggccacttagtgataataaattcttcccaactgca

SEQ ID NO: 14648 - DNA, 2566 bp, Homo sapiens
cgtcgccgtccccgtctcctgccaggcgcggagccctgcgagccgcgggtgggccccaggcgcgcagacatgggctgctccgccaaagcgcgctgggctgccggggcgctgggcgtcgcggggctactgtgcgctgtgctgggcgctgtcatgatcgtgatggtgccgtcgctcatcaagcagcaggtccttaagaacgtgcgcatcgaccccagtagcctgtccttcaacatgtggaaggagatccctatccccttctatctctccgtctacttctttgacgtcatgaaccccagcgagatcctgaagggcgagaagccgcaggtgcgggagcgcgggccctacgtgtacagggagtccaggcacaaaagcaacatcaccttcaacaacaacgacaccgtgtccttcctcgagtaccgcaccttccagttccagccctccaagtcccacggctcggagagcgactacatcgtcatgcccaacatcctggtcttgggtgcggcggtgatgatggagaataagcccatgaccctgaagctcatcatgaccttggcattcaccaccctcggcgaacgtgccttcatgaaccgcactgtgggtgagatcatgtggggctacaaggacccccttgtgaatctcatcaacaagtactttccaggcatgttccccttcaaggacaagttcggattatttgctgagctcaacaactccgactctgggctcttcacggtgttcacgggggtccagaacatcagcaggatccacctcgtggacaagtggaacgggctgagcaaggttgacttctggcattccgatcagtgcaacatgatcaatggaacttctgggcaaatgtggccgcccttcatgactcctgagtcctcgctggagttctacagcccggaggcctgccgatccatgaagctaatgtacaaggagtcaggggtgtttgaaggcatccccacctatcgcttcgtggctcccaaaaccctgtttgccaacgggtccatctacccacccaacgaaggcttctgcccgtgcctggagtctggaattcagaacgtcagcacctgcaggttcagtgcccccttgtttctctcccatcctcacttcctcaacgccgacccggttctggcagaagcggtgactggcctgcaccctaaccaggaggcacactccttgttcctggacatccacccggtcacgggaatccccatgaactgctctgtgaaactgcagctgagcctctacatgaaatctgtcgcaggcattggacaaactgggaagattgagcctgtggtcctgccgctgctctggtttgcagagagcggggccatggagggggagactcttcacacattctacactcagctggtgttgatgcccaaggtgatgcactatgcccagtacgtcctcctggcgctgggctgcgtcctgctgctggtccctgtcatctgccaaatccggagccaagagaaatgctatttattttggagtagtagtaaaaagggctcaaaggataaggaggccattcaggcctattctgaatccctgatgacatcagctcccaagggctctgtgctgcaggaagcaaaactgtagggtcctgaggacaccgtgagccagccaggcctggccgctgggcctgaccggccccccagcccctacaccccgcttctcccggactctcccagcagacagccccccagccccacagcctgagcctcccagctgccatgtgcctgttgcacacctgcacacacgccctggcacacatacacacatgcgtgcaggcttgtgcagacactcagggatggagctgctgctgaagggacttgtagggagaggctcgtcaacaagcactgttctggaaccttctctccacgtggcccacaggctgaccacaggggctgtgggtcctgcgtccccttcctcgggtgagcctggcctgtcccgttcagccgttgggccaggcttcctcccctccaaggtgaaacactgcagtcccggtgtggtggctccccatgcaggacgggccaggctgggagtgccgccttcctgtgccaaattcagtggggactcagtgcccaggccctggcacgagctttggccttggtctacctgccaggccaggcaaagcgcctttacacaggcctcggaaaacaatggagtgagcacaagatgccctgtgcagctgcccgagggtctccgcccaccccggccggactttgatccccccgaagtcttcacaggcactgcatcgggttgtctggcgcccttttcctccagcctaaactgacatcatcctatggactgagccggccactctctggccgaagtggcgcaggctgtgcccccgagctgcccccaccccctcacagggtccctcagattataggtgcccaggctgaggtgaagaggcctgggggccctgccttccgggcgctcctggaccctggggcaaacctgtgacccttttctactggaatagaaatgagttttatcatctttgaaaaataattcactcttgaagtaataaacgtttaaaaaaatggaaaaaaaaaaaaaa

SEQ ID NO: 14649 - DNA, 766 bp, Homo sapiens
acgcgatacaagtacgtaatgacgacagacgttctttctttgctgcgtctactgcgagaatgaagactattctcagcaatcagactgtcgacattccagaaaatgtcgacattactctgaagggacgcacagttatcgtgaagggccccagaggaaccctgcggagggacttcaatcacatcaatgtagaactcagccttcttggaaagaaaaaaaagaggctccgggttgacaaatggtggggtaacagaaaggaactggctaccgttcggactatttgtagtcatgtacagaacatgatcaagggtgttacactgggcttccgttacaagatgaggtctgtgtatgctcacttccccatcaacgttgttatccaggagaatgggtctcttgttgaaatccgaaatttcttgggtgaaaaatatatccgcagggttcggatgagaccaggtgttgcttgttcagtatctcaagcccagaaagatgaattaatccttgaaggaaatgacattgagcttgtttcaaattcagcggctttgattcagcaagccacaacagttaaaaacaaggatatcaggaaatttttggatggtatctatgtctctgaaaaaggaactgttcagcaggctgatgaataagatctaagagttacctggctacagaaagaagatgccagatgacacttaagacctacttgtgatatttaaatgatgcaataaaagacctattgatttggaccttcttcttaaaaaaaaaaaaaaaaaaa

SEQ ID NO: 14650 - DNA, 2603 bp, Homo sapiens
ccacgcgtccgcgctcccctcagctcctgcagtgctaattaagggagggagcagcggggagcttgcagtgaccaagagggtgttgaggctaggaggccacgataaacaggatacgataaaagtccttaaccaagacgcagatgggaagaagcgttagagcgagcagcactcacatctcaagaaccagcctttcaaacagtttccagagatggattatcctactttacttttggctcttcttcatgtatacagagctctatgtgaagaggtgctttggcatacatcagttccctttgccgagaacatgtctctagaatgtgtgtatccatcaatgggcatcttaacacaggtggagtggttcaagatcgggacccagcaggattccatagccattttcagccctactcatggcatggtcataaggaagccctatgctgagagggtttactttttgaattcaacgatggcttccaataacatgactcttttctttcggaatgcctctgaagatgatgttggctactattcctgctctctttacacttacccacagggaacttggcagaaggtgatacaggtggttcagtcagatagttttgaggcagctgtgccatcaaatagccacattgtttcggaacctggaaagaatgtcacactcacttgtcagcctcagatgacgtggcctgtgcaggcagtgaggtgggaaaagatccagccccgtcagatcgacctcttaacttactgcaacttggtccatggcagaaatttcacctccaagttcccaagacaaatagtgagcaactgcagccacggaaggtggagcgtcatcgtcatccccgatgtcacagtctcagactcggggctttaccgctgctacttgcaggccagcgcaggagaaaacgaaaccttcgtgatgagattgactgtagccgagggtaaaaccgataaccaatataccctctttgtggctggagggacagttttattgttgttgtttgttatctcaattaccaccatcattgtcattttccttaacagaaggagaaggagagagagaagagatctatttacagagtcctgggatacacagaaggcacccaataactatagaagtcccatctctaccggtcaacctaccaatcaatccatggatgatacaagagaggatatttatgtcaactatccaaccttctctcgcagaccaaagactagagtttaagcttattcttgacatgagtgcattagtaatgactcttatgtactcatgcatggatctttatgcaatttttttccactacccaaggtctaccttagatactagttgtctgaattgagttactttgataggaaaaatacttcattacctaaaatcatttttcatagaactgtttcagaaaacctgactctaactggtttatatacaaaagaaaacttactgtatcatataacagaatgatccaggggagattaagctttgggcaagggctatttaccagggcttaaatgttgtgtctagaattaagtatgggcataaactggcttctgaatccctttccagagtgttggatccatttccctggtcttggcctcactctcatgcaggctttcctcttgtgttggcaagatggctgccaactcttggcaattcatacatccttgtttctgtctggtagagagtttgcttctcaaatggagcaaacaaatttgattattttttcattgttaaataggcaacatgaccagaaaggatggaatggcttaagtaaactaagggttcacttctagagctgagaagcagggtcaaagcacaatactgggcaattcagagcatggttagaagaggaaaggggagtctcaaagctggagagtttaccaacaaatattgactgcagtgattaaccaagacatttttgttaactaaaaagtgaaatatgggatggattctagaaatggggtatctctgtccatacttctagaatccactctatcagcatagtccagaagaatacctggcagtagaagaaatgaatattcaagaggaagataaatgcgagagggcaatcctttactattctcatatttatttatctctcattctgtatagaattcttgccgccatcccaggtctagccttaggagcaaatgtagtagatagtcgaataataaataacttaatgttttggacatattttgtctacttttgagaattatttttaatatgtaaattctctcaaaagggtcaggcacctagttattattttttaatgattatgtgaaagttgaatataatataccactaaaagtgacagttgaaagtggtggcataggatggtagggtagaaatttgggagggaaaaaagaaattgggagggtacaggcaacaggagaaaggaatcaaaccacagaaaaatacaaagggaaacttctgcttcactattcagacaaagacagccctaatgacatcaccaacagtcaaagcaattagagaccatacctaatattgtttaaattctagatgtaggctaacaatgaaaagtatttgccaaactgaataaaactgtcatggttaccttgaaaaaaaaaaaaaaaaaaaaaaaaaaaaa

SEQ ID NO: 14651 - DNA, 2037 bp, Homo sapiens
agtcagggaggcgaactgctgagcactggccgcggacgctccgttgcagtctcgcccaggggccggtacctgcgctcgcgccgccgggttgaaaggatgaagccgcagctggagcagccaccctatgattggctgtggcgcttgtgaacccaaagtaaagatggcgggcgggcaggcagccgccgcactgcccacttggaagatggcggcgcgccgcagcctcagcgctcgcggccgggggatcctgcaggcggctgcggggcggctgctgccgctgctcctgctgagctgctgctgcggtgcgggcggctgcgcagcggtgggcgagaatgaggagacggtgatcatcgggctgcgactggaggacacgaacgacgtgtcgttcatggaagggggggcgctgcgggtgagcgaacggacccgggtcaagctgcgggtgtacgggcagaacatcaataacgagacgtggtcccgcatcgccttcaccgagcacgagcggcggcgccacagcccgggggagcgcgggctggggggccccgcgccgccagagccggacagcggcccccagcgatgcggcatccgcacctcagacatcatcatcttgccccacatcattctcaaccgccgcacctcgggcatcatcgagatcgagatcaaaccgctacgcaagatggagaagagcaagtcctattacctgtgcacgtcgctctccacgcccgccctgggcgccggcggctcggggtccacgggtggcgccgtcgggggcaagggtggctcgggggtggccgggctcccgccgcccccgtgggccgagaccacctggatttaccacgacggcgaggacaccaagatgatcgtaggcgaagagaagaagttcctgctgcccttctggctgcaggtgatcttcatttcgctgctgctgtgcctgtcgggcatgttcagcggcctcaacctggggctcatggccctggacccgatggagctgcgcatcgtgcagaactgcggcacggagaaggagaagaattacgccaagcgcatcgagccggtgcgcaggcagggcaactacctgctgtgctcactgctgctgggcaacgtgctggtcaacaccacgctcaccatcctgctcgacgacatcgccggctcgggcctcgtggccgtggtagtctccaccatcggtatcgtcatcttcggagagatcgtgccccaggccatctgctcccggcatggcctggctgtgggggccaacaccatcttcctcaccaagtttttcatgatgatgaccttccccgcttcctacccggtcagcaagctgctggactgcgtcctgggccaggagataggcaccgtctataaccgggaaaaactgctggagatgctccgggtcaccgatccctacaacgacctcgttaaggaggagctgaacatcatccaaggggcgctggagctccgcaccaagacggtggaggacgtgatgaccccactccgggactgcttcatgatcaccggcgaagccatcctggacttcaacaccatgtctgagatcatggagagcggctacacccgcattccagtgtttgaaggggagcgctccaatatcgtggacctgctgtttgtcaaagacttggccttcgtggatcccgatgactgtacccccctgaaaaccatcaccaaattttataaccaccccttgcactttgttttcaatgacaccaagttggacgctatgctggaagaatttaagaaagaacacacaaacaagaaacccaaatcataccaacactgaaaagaagagacaataagaagcattctttctttcaacatcacagacattggcaactctaggatgtctatacagagggataaaaaggggtggcagttggctgggcgtggtggctcatgcctgtaatcccggcactttgggaggcccagggaggtggatcacttgaggtcaggagttccagactgacagtctggccaccatggtgaaaccccgtttctaataaaaatacagaaaaattaaaaaaaaaaaaaaaaaaa

SEQ ID NO: 14652 - DNA, 4005 bp, Homo sapiens
agtcagggaggcgaactgctgagcactggccgcggacgctccgttgcagtctcgcccaggggccggtacctgcgctcgcgccgccgggttgaaaggatgaagccgcagctggagcagccaccctatgattggctgtggcgcttgtgaacccaaagtaaagatggcgggcgggcaggcagccgccgcactgcccacttggaagatggcggcgcgccgcagcctcagcgctcgcggccgggggatcctgcaggcggctgcggggcggctgctgccgctgctcctgctgagctgctgctgcggtgcgggcggctgcgcagcggtgggcgagaatgaggagacggtgatcatcgggctgcgactggaggacacgaacgacgtgtcgttcatggaagggggggcgctgcgggtgagcgaacggacccgggtcaagctgcgggtgtacgggcagaacatcaataacgagacgtggtcccgcatcgccttcaccgagcacgagcggcggcgccacagcccgggggagcgcgggctggggggccccgcgccgccagagccggacagcggcccccagcgatgcggcatccgcacctcagacatcatcatcttgccccacatcattctcaaccgccgcacctcgggcatcatcgagatcgagatcaaaccgctacgcaagatggagaagagcaagtcctattacctgtgcacgtcgctctccacgcccgccctgggcgccggcggctcggggtccacgggtggcgccgtcgggggcaagggtggctcgggggtggccgggctcccgccgcccccgtgggccgagaccacctggatttaccacgacggcgaggacaccaagatgatcgtaggcgaagagaagaagttcctgctgcccttctggctgcaggtgatcttcatttcgctgctgctgtgcctgtcgggcatgttcagcggcctcaacctggggctcatggccctggacccgatggagctgcgcatcgtgcagaactgcggcacggagaaggagaagaattacgccaagcgcatcgagccggtgcgcaggcagggcaactacctgctgtgctcactgctgctgggcaacgtgctggtcaacaccacgctcaccatcctgctcgacgacatcgccggctcgggcctcgtggccgtggtagtctccaccatcggtatcgtcatcttcggagagatcgtgccccaggccatctgctcccggcatggcctggctgtgggggccaacaccatcttcctcaccaagtttttcatgatgatgaccttccccgcttcctacccggtcagcaagctgctggactgcgtcctgggccaggagataggcaccgtctataaccgggaaaaactgctggagatgctccgggtcaccgatccctacaacgacctcgttaaggaggagctgaacatcatccaaggggcgctggagctccgcaccaagacggtggaggacgtgatgaccccactccgggactgcttcatgatcaccggcgaagccatcctggacttcaacaccatgtctgagatcatggagagcggctacacccgcattccagtgtttgaaggggagcgctccaatatcgtggacctgctgtttgtcaaagacttggccttcgtggatcccgatgactgtacccccctgaaaaccatcaccaaattttataaccaccccttgcactttgttttcaatgacaccaagttggacgctatgctggaagaatttaagaaaggtaaatctcacctggctatcgtgcagcgggtaaacaatgagggagaaggggatccattttatgaagttctgggaatcgtcaccttagaagatgtgattgaagaaatcatcaaatctgagattcttgatgaaacagatttatacactgacaacagaacgaaaaagaaagtggctcaccgggaacgaaagcaagatttttctgcctttaagcagacagacagtgagatgaaggttaaaatatcaccacagctcctcctggccatgcaccgtttcctagcaacagaagtagaagcatttagcccatcccagatgtcagagaagatccttctaaggctgctaaagcaccccaatgtcatccaggaactgaaatatgatgagaagaacaagaaagcccccgaatactacctctaccagcgcaacaagccagtagactacttcgttctcattctgcaggggaaagtggaagttgaagctgggaaagaaggtatgaagtttgaagcgagcgccttctcatactatggcgtgatggccctgacagcctctccaggtgaaaataagtcccctcctcgcccatgtggcttgaatcactcagactctctcagtcgaagcgaccggattgacgccgtcacaccaacactggggagcagcaataaccagctcaattcttcgctcctccaagtctacatccccgattactcggtgcgagccctttcggatctgcagtttgttaagatctcaagacagcaataccaaaatgccttgatggcatcccggatggacaaaaccccccagtcttcagacagtgaaaacactaaaatcgaattgactcttacggagctgcatgacgggttgccagacgagacagccaacctgctcaacgaacagaactgtgtgacgcacagtaaggccaaccacagcctgcacaacgaaggcgccatctaggccgcgctggctgcacccgcccaggcccgcacccgcccagtcccgagggcccggccctgtctgcccatgacttcactggtgtgagcttgtccgccatgctgtaccctgcaacatcctgagaccaaagaccttgtgcccttcccaggagccgcggaggaggacagtgagggaggaatggaaacgagagatgtgaagttggcagccggggcatggcgttcaagattttggagatgaactgattccgcccaaatagaatcatgtttattttttcagctctcccttttatcattattcacactcctctgccctcgatttgcatgaagttgaaaattgttgcgatttattttttcaagagatcatgtttttaaagtgtcttttgcagagttttaagttgttctgtctgaactctgctgtgatcccatgatgtgaccctgatgggctggacttgcccctccggtagccttccttggccctcccagcgaggggcacccttcctctgtgccccagtgggcatcaccgtcgatctcgctggctgaatgaagaagaccgtgttactgcagaacctgccaagtctgtcatcactgtggggtgtagcctgcctcagagggacctgcaatcacctctctgagctcagtggtattttgagaatttaatgtttaactgtacccctttccctcaggaagatttaacatttgcttgggaatgtgattttgctcccaccctaaggaatttttatcaccaaaatgaatgttaatgaatttaaaacccatggtttatcattggcaagaggcaagttgacttcatcctgtcattccagcctggggtctgccagccagccctcctccccgacccagcgcctaagctcacagagtgtcgtcgcccacctccctggtccttgctcttgttaacccaagatgctgctacacagatgccaaatggaaatcttccacagggctttttcagtaaacacgtgatgtggagtgcaagctcctccccttcccactagaacatactttaacagaaaacgagtcggaccttctagctgcactctgtactgtgtgccgagaaggcatttctagacccgtgtttttaaaggagggaactttggggattgccagcccctgctcctcctcccagggagccaactgtccctcctcccctgtccctgggcccatggggcccggcagtggctgtgtcccctgcctgagggctctgtgcctcctgcctcagatgcggcctgtgccagagaggctgcctgtacagccagggtcagtttggccccaaacagggattcagaaaccaaaaaaaaaaaaaaaaaa

SEQ ID NO: 14653 - DNA, 4071 bp, Homo sapiens
agtcagggaggcgaactgctgagcactggccgcggacgctccgttgcagtctcgcccaggggccggtacctgcgctcgcgccgccgggttgaaaggatgaagccgcagctggagcagccaccctatgattggctgtggcgcttgtgaacccaaagtaaagatggcgggcgggcaggcagccgccgcactgcccacttggaagatggcggcgcgccgcagcctcagcgctcgcggccgggggatcctgcaggcggctgcggggcggctgctgccgctgctcctgctgagctgctgctgcggtgcgggcggctgcgcagcggtgggcgagaatgaggagacggtgatcatcgggctgcgactggaggacacgaacgacgtgtcgttcatggaagggggggcgctgcgggtgagcgaacggacccgggtcaagctgcgggtgtacgggcagaacatcaataacgagacgtggtcccgcatcgccttcaccgagcacgagcggcggcgccacagcccgggggagcgcgggctggggggccccgcgccgccagagccggacagcggcccccagcgatgcggcatccgcacctcagacatcatcatcttgccccacatcattctcaaccgccgcacctcgggcatcatcgagatcgagatcaaaccgctacgcaagatggagaagagcaagtcctattacctgtgcacgtcgctctccacgcccgccctgggcgccggcggctcggggtccacgggtggcgccgtcgggggcaagggtggctcgggggtggccgggctcccgccgcccccgtgggccgagaccacctggatttaccacgacggcgaggacaccaagatgatcgtaggcgaagagaagaagttcctgctgcccttctggctgcaggtgatcttcatttcgctgctgctgtgcctgtcgggcatgttcagcggcctcaacctggggctcatggccctggacccgatggagctgcgcatcgtgcagaactgcggcacggagaaggagaagaattacgccaagcgcatcgagccggtgcgcaggcagggcaactacctgctgtgctcactgctgctgggcaacgtgctggtcaacaccacgctcaccatcctgctcgacgacatcgccggctcgggcctcgtggccgtggtagtctccaccatcggtatcgtcatcttcggagagatcgtgccccaggccatctgctcccggcatggcctggctgtgggggccaacaccatcttcctcaccaagtttttcatgatgatgaccttccccgcttcctacccggtcagcaagctgctggactgcgtcctgggccaggagataggcaccgtctataaccgggaaaaactgctggagatgctccgggtcaccgatccctacaacgacctcgttaaggaggagctgaacatcatccaaggggcgctggagctccgcaccaagacggtggaggacgtgatgaccccactccgggactgcttcatgatcaccggcgaagccatcctggacttcaacaccatgtctgagatcatggagagcggctacacccgcattccagtgtttgaaggggagcgctccaatatcgtggacctgctgtttgtcaaagacttggccttcgtggatcccgatgactgtacccccctgaaaaccatcaccaaattttataaccaccccttgcactttgttttcaatgacaccaagttggacgctatgctggaagaatttaagaaaggtaaatctcacctggctatcgtgcagcgggtaaacaatgagggagaaggggatccattttatgaagttctgggaatcgtcaccttagaagatgtgattgaagaaatcatcaaatctgagattcttgatgaaacagatttatacactgacaacagaacgaaaaagaaagtggctcaccgggaacgaaagcaagatttttctgcctttaagcagacagacagtgagatgaaggttaaaatatcaccacagctcctcctggccatgcaccgtttcctagcaacagaagtagaagcatttagcccatcccagatgtcagagaagatccttctaaggctgctaaagcaccccaatgtcatccaggaactgaaatatgatgagaagaacaagaaagcccccgaatactacctctaccagcgcaacaagccagtagactacttcgttctcattctgcaggggaaagtggaagttgaagctgggaaagaaggtatgaagtttgaagcgagcgccttctcatactatggcgtgatggccctgacagcctctccagttcctttgtccctgtctcgtacctttgttgtcagcagaacagagttgttagcagcaggttctccaggtgaaaataagtcccctcctcgcccatgtggcttgaatcactcagactctctcagtcgaagcgaccggattgacgccgtcacaccaacactggggagcagcaataaccagctcaattcttcgctcctccaagtctacatccccgattactcggtgcgagccctttcggatctgcagtttgttaagatctcaagacagcaataccaaaatgccttgatggcatcccggatggacaaaaccccccagtcttcagacagtgaaaacactaaaatcgaattgactcttacggagctgcatgacgggttgccagacgagacagccaacctgctcaacgaacagaactgtgtgacgcacagtaaggccaaccacagcctgcacaacgaaggcgccatctaggccgcgctggctgcacccgcccaggcccgcacccgcccagtcccgagggcccggccctgtctgcccatgacttcactggtgtgagcttgtccgccatgctgtaccctgcaacatcctgagaccaaagaccttgtgcccttcccaggagccgcggaggaggacagtgagggaggaatggaaacgagagatgtgaagttggcagccggggcatggcgttcaagattttggagatgaactgattccgcccaaatagaatcatgtttattttttcagctctcccttttatcattattcacactcctctgccctcgatttgcatgaagttgaaaattgttgcgatttattttttcaagagatcatgtttttaaagtgtcttttgcagagttttaagttgttctgtctgaactctgctgtgatcccatgatgtgaccctgatgggctggacttgcccctccggtagccttccttggccctcccagcgaggggcacccttcctctgtgccccagtgggcatcaccgtcgatctcgctggctgaatgaagaagaccgtgttactgcagaacctgccaagtctgtcatcactgtggggtgtagcctgcctcagagggacctgcaatcacctctctgagctcagtggtattttgagaatttaatgtttaactgtacccctttccctcaggaagatttaacatttgcttgggaatgtgattttgctcccaccctaaggaatttttatcaccaaaatgaatgttaatgaatttaaaacccatggtttatcattggcaagaggcaagttgacttcatcctgtcattccagcctggggtctgccagccagccctcctccccgacccagcgcctaagctcacagagtgtcgtcgcccacctccctggtccttgctcttgttaacccaagatgctgctacacagatgccaaatggaaatcttccacagggctttttcagtaaacacgtgatgtggagtgcaagctcctccccttcccactagaacatactttaacagaaaacgagtcggaccttctagctgcactctgtactgtgtgccgagaaggcatttctagacccgtgtttttaaaggagggaactttggggattgccagcccctgctcctcctcccagggagccaactgtccctcctcccctgtccctgggcccatggggcccggcagtggctgtgtcccctgcctgagggctctgtgcctcctgcctcagatgcggcctgtgccagagaggctgcctgtacagccagggtcagtttggccccaaacagggattcagaaaccaaaaaaaaaaaaaaaaaa

SEQ ID NO: 14654 - DNA, 5133 bp, Homo sapiens
cctctttcaccctgtctaggttgccagcaaatcccacgggcctcctgacgctgcccctggggccacaggtccctcgagtgctggaaggatgaaggattcctgcatcactgtgatggccatggcgctgctgtctgggttctttttcttcgcgccggcctcgagctacaacctggacgtgcggggcgcgcggagcttctccccaccgcgcgccgggaggcactttggataccgcgtcctgcaggtcggaaacggggtcatcgtgggagctccaggggaggggaacagcacaggaagcctctatcagtgccagtcgggcacaggacactgcctgccagtcaccctgagaggttccaactatacctccaagtacttgggaatgaccttggcaacagaccccacagatggaagcattttggcctgtgaccctgggctgtctcgaacgtgtgaccagaacacctatctgagtggcctgtgttacctcttccgccagaatctgcagggtcccatgctgcaggggcgccctggttttcaggaatgtatcaagggcaacgtagacctggtatttctgtttgatggttcgatgagcttgcagccagatgaatttcagaaaattctggacttcatgaaggatgtgatgaagaaactcagcaacacttcgtaccagtttgctgctgttcagttttccacaagctacaaaacagaatttgatttctcagattatgttaaatggaaggaccctgatgctctgctgaagcatgtaaagcacatgttgctgttgaccaatacctttggtgccatcaattatgtcgcgacagaggtgttccgggaggagctgggggcccggccagatgccaccaaagtgcttatcatcatcacggatggggaggccactgacagtggcaacatcgatgcggccaaagacatcatccgctacatcatcgggattggaaagcattttcagaccaaggagagtcaggagaccctccacaaatttgcatcaaaacccgcgagcgagtttgtgaaaattctggacacatttgagaagctgaaagatctattcactgagctgcagaagaagatctatgtcattgagggcacaagcaaacaggacctgacttccttcaacatggagctgtcctccagcggcatcagtgctgacctcagcaggggccatgcagtcgtgggggcagtaggagccaaggactgggctgggggctttcttgacctgaaggcagacctgcaggatgacacatttattgggaatgaaccattgacaccagaagtgagagcaggctatttgggttacaccgtgacctggctgccctcccggcaaaagacttcgttgctggcctcgggagcccctcgataccagcacatgggccgagtgctgctgttccaagagccacagggcggaggacactggagccaggtccagacaatccatgggacccagattggctcttatttcggtggggagctgtgtggcgtcgacgtggaccaagatggggagacagagctgctgctgattggtgccccactgttctatggggagcagagaggaggccgggtgtttatctaccagagaagacagttggggtttgaagaagtctcagagctgcagggggaccccggctacccactcgggcggtttggagaagccatcactgctctgacagacatcaacggcgatgggctggtagacgtggctgtgggggcccctctggaggagcagggggctgtgtacatcttcaatgggaggcacggggggcttagtccccagccaagtcagcggatagaagggacccaagtgctctcaggaattcagtggtttggacgctccatccatggggtgaaggaccttgaaggggatggcttggcagatgtggctgtgggggctgagagccagatgatcgtgctgagctcccggcccgtggtggatatggtcaccctgatgtccttctctccagctgagatcccagtgcatgaagtggagtgctcctattcaaccagtaacaagatgaaagaaggagttaatatcacaatctgtttccagatcaagtctctctacccccagttccaaggccgcctggttgccaatctcacttacactctgcagctggatggccaccggaccagaagacgggggttgttcccaggagggagacatgaactcagaaggaatatagctgtcaccaccagcatgtcatgcactgacttctcatttcatttcccggtatgtgttcaagacctcatctcccccatcaatgtttccctgaatttctctctttgggaggaggaagggacaccgagggaccaaagggcgcagggcaaggacataccgcccatcctgagaccctccctgcactcggaaacctgggagatcccttttgagaagaactgtggggaggacaagaagtgtgaggcaaacttgagagtgtccttctctcctgcaagatccagagccctgcgtctaactgcttttgccagcctctctgtggagctgagcctgagtaacttggaagaagatgcttactgggtccagctggacctgcacttccccccgggactctccttccgcaaggtggagatgctgaagccccatagccagatacctgtgagctgcgaggagcttcctgaagagtccaggcttctgtccagggcattatcttgcaatgtgagctctcccatcttcaaagcaggccactcggttgctctgcagatgatgtttaatacactggtaaacagctcctggggggactcggttgaattgcacgccaatgtgacctgtaacaatgaggactcagacctcctggaggacaactcagccactaccatcatccccatcctgtaccccatcaacatcctcatccaggaccaagaagactccacactctatgtcagtttcacccccaaaggccccaagatccaccaagtcaagcacatgtaccaggtgaggatccagccttccatccacgaccacaacatacccaccctggaggctgtggttggggtgccacagcctcccagcgaggggcccatcacacaccagtggagcgtgcagatggagcctcccgtgccctgccactatgaggatctggagaggctcccggatgcagctgagccttgtctccccggagccctgttccgctgccctgttgtcttcaggcaggagatcctcgtccaagtgatcgggactctggagctggtgggagagatcgaggcctcttccatgttcagcctctgcagctccctctccatctccttcaacagcagcaagcatttccacctctatggcagcaacgcctccctggcccaggttgtcatgaaggttgacgtggtgtatgagaagcagatgctctacctctacgtgctgagcggcatcggggggctgctgctgctgctgctcattttcatagtgctgtacaaggttggtttcttcaaacggaacctgaaggagaagatggaggctggcagaggtgtcccgaatggaatccctgcagaagactctgagcagctggcatctgggcaagaggctggggatcccggctgcctgaagcccctccatgagaaggactctgagagtggtggtggcaaggactgagtccaggcctgtgaggtgcagagtgcccagaactggactcaggatgcccagggccactctgcctctgcctgcattctgccgtgtgccctcgggcgagtcactgcctctccctggccctcagtttccctatctcgaacatggaactcattcctgaatgtctcctttgcaggctcatagggaagacctgctgagggaccagccaagagggctgcaaaagtgagggcttgtcattaccagacggttcaccagcctctcttggttccttccttggaagagaatgtctgatctaaatgtggagaaactgtagtctcaggacctagggatgttctggccctcacccctgccctgggatgtccacagatgcctccaccccccagaacctgtccttgcacactcccctgcactggagtccagtctcttctgctggcagaaagcaaatgtgacctgtgtcactacgtgactgtggcacacgccttgttcttggccaaagaccaaattccttggcatgccttccagcaccctgcaaaatgagaccctcgtggccttccccagcctcttctagagccgtgatgcctccctgttgaagctctggtgacaccagcctttctcccaggccaggctccttcctgtcttcctgcattcacccagacagctccctctgcctgaaccttccatctcgcccacccctccttccttgaccagcagatcccagctcacgtcacacacttggttgggtcctcacatctttcacacttccaccaccctgcactactccctcaaagcacacgtcatgtttcttcatccggcagcctggatgttttttccctgtttaatgattgacgtacttagcagctatctctcagtgaactgtgagggtaaaggctatacttgtcttgttcaccttgggatgacgccgcatgatatgtcagggcgtgggacatctagtaggtgcttgacataatttcactgaattaatgacagagccagtgggaagatacagaaaaagagggccggggctgggcgcggtggttcacgcctgtaatcccagcactttgggaggccaaggagggtggatcacctgaggtcaggagttagaggccagcctggcgaaaccccatctctactaaaaatacaaaatccaggcgtggtggcacacacctgtagtcccagctactcaggaggttgaggtaggagaattgcttgaacctgggaggtggaggttgcagtgagccaagattgcgccattgcactccagcctgggcaacacagcgagactccgtctcaaggaaaaaataaaaataaaaagcgggcacgggcccggacatccccacccttggaggctgtcttctcaggctctgccctgccctagctccacaccctctcccaggacccatcacgcctgtgcagtggcccccacagaaagactgagctcaaggtgggaaccacgtctgctaacttggagccccagtgccaagcacagtgcctgcatgtatttatccaataaatgtgaaattctgtccaaaaaaaaaaaa

SEQ ID NO: 14655 - DNA, 4208 bp, Homo sapiens
ggaagggcagccgtctgccgcccacgaacaccttctcaagcactttgagtgaccacggcttgcaagctggtggctggccccccgagtcccgggctctgaggcacggccgtcgacttaagcgttgcatcctgttacctggagaccctctgagctctcacctgctacttctgccgctgcttctgcacagagcccgggcgaggacccctccaggatgcaggtcccgaacagcaccggcccggacaacgcgacgctgcagatgctgcggaacccggcgatcgcggtggccctgcccgtggtgtactcgctggtggcggcggtcagcatcccgggcaacctcttctctctgtgggtgctgtgccggcgcatggggcccagatccccgtcggtcatcttcatgatcaacctgagcgtcacggacctgatgctggccagcgtgttgcctttccaaatctactaccattgcaaccgccaccactgggtattcggggtgctgctttgcaacgtggtgaccgtggccttttacgcaaacatgtattccagcatcctcaccatgacctgtatcagcgtggagcgcttcctgggggtcctgtacccgctcagctccaagcgctggcgccgccgtcgttacgcggtggccgcgtgtgcagggacctggctgctgctcctgaccgccctgtccccgctggcgcgcaccgatctcacctacccggtgcacgccctgggcatcatcacctgcttcgacgtcctcaagtggacgatgctccccagcgtggccatgtgggccgtgttcctcttcaccatcttcatcctgctgttcctcatcccgttcgtgatcaccgtggcttgttacacggccaccatcctcaagctgttgcgcacggaggaggcgcacggccgggagcagcggaggcgcgcggtgggcctggccgcggtggtcttgctggcctttgtcacctgcttcgcccccaacaacttcgtgctcctggcgcacatcgtgagccgcctgttctacggcaagagctactaccacgtgtacaagctcacgctgtgtctcagctgcctcaacaactgtctggacccgtttgtttattactttgcgtcccgggaattccagctgcgcctgcgggaatatttgggctgccgccgggtgcccagagacaccctggacacgcgccgcgagagcctcttctccgccaggaccacgtccgtgcgctccgaggccggtgcgcaccctgaagggatggagggagccaccaggcccggcctccagaggcaggagagtgtgttctgagtcccgggggcgcagcttggagagccgggggcgcagcttggagatccaggggcgcatggagaggccacggtgccagaggttcagggagaacagctgcgttgctcccaggcactgcagaggcccggtggggaagggtctccaggctttattcctcccaggcactgcagaggcaccggtgaggaagggtctccaggcttcactcagggtagagaaacaagcaaagcccagcagcgcacagggtgcttgttatcctgcagagggtgcctctgcctctctgtgtcaggggacagcttgtgtcaccacgcccggctaatttttgtattttttttagtagagctgggctgtcacccccgagctccttagacactcctcacacctgtccatacccgagggtggatattcaaccagccccaccgcctacccgactcggtttctggatatcctccgtgggcgaactgcgagccccattcccagctcttctccctgctgacatcgtcccttagttgtggttctggccttctccattctcctccaggggttctggtctccgtagcccggtgcacgccgaaatttctgtttatttcactcaggggcactgtggttgctgtggttggaattcttctttcagaggagcgcctggggctcctgcaagtcagctactctccgtgcccacttccccccacacacacaccccaccctgttgctgaccaaggtgatttttggcacatttgttctggcctggcttggtgggaccccacccctattctgcttctgtgagtccctgatagagaaggaggtcccatcaggcccctggaacacactcaggcttccctgactcaggacaaggaccacgggaggcccaggtgcggaaaggaggctccgtgagatggggtccagcccatcccaacacaagggtgcagcttgattcgggagttccccacctcctgcccattctccgcgtccttttaccccatggagagcctcagccatggcaagtccatctggagtccaggaagcaggcaactggcctgacccatgagaccgtttggagaccaagcagcagatgcaggtgtggaccccaggaacctacaggggtgtcagccgctgagccccctccctgctgtgtgggtggtgagcaggctgggtctttgtctgtcttcttctacacggcatgtgcctgcaccagccccaacacctgagctggtttagcgcaaagaagagctctgactctccaggggtgctgggacatcacgtggaattggatcccaggctctcttgggcgagaaagaccattctggaggtgggagtgggagagctgcctgtctgcccacgggctctgcgtctccgcagtgggtggccttggatgcccggcccctccctttctgtgcactggggacgctgatggaggctgaagctgctgttcggaggccctctattggtgcctctctcctgccgtcatcactatggcaggaaaacagagatggtttagtaatgaattatcattcccaaacccgtgtccacctggaacatcaggatgggaccatgtttgaaaatcgggtctttccaaatgtaattaagtaaggcgaggccatactgcatttacaatgggcccaatccagtgtccctatgagagacggaagaggagacacagacacaaagcaggaggccacataaagacagaggcagagactgaagtgatgctgccccaagcccagggatgcctggagtccccaggagctgggagaggcaggaaggaccctcccctagagtctctggagggaactggatacaattgcagagtgcactaaacagttgccccagaaagacatgtcttgttttaaagcccagaacctgaaattattatagattttattcggtaataaggaactttgcatgtgtaattacttaaggatatgaagatgagattgtgctggattattaagcaccctaaatgccatgacaggtgtccttccaagagacagaagaggagacacagacacagagcaggaggacacgtggagacagaggcagactggagtgatgcggccacaagcccagggacacctggagcccccaggagctgggagaggcaggaaggatcctcccctagagcctccagggggaactggaggatgcgtaagagacccagaacttccacagaaggaggaaaattaacctcctgcttctctagactgttccaaagctgaaccctagaaagcaaagctgatacagaagcatccaggctgcaggagtacaggtcgcaagtgctgagcgtgggccttgggtgtgtctcatgggggaaaaaaaactgtgaaaaacctcagagtagcatcttcacagtaacgcacggacgatccctaaactgccttgtaaacaaaaatgagagcttgagtcagaggaagccgagacaatatccttcctcgacaacgtgcgagaaccctgacgtcccccagcaaaggaagacgttgcaagcaggcaaaatgcgtcgatttttttttttgtcagtatgatgatttttgcagccacttggctatggagagcagccgacaccccctcttacagccgtggatgtttcctggaagctgactcagtctgttcactggttgagctttgagtgaaaagataacacaggtctattgactcacacacatgttttaagatggaaaactttacttctgttcttggcaggacatggagagagggagggattccaaaaagtctcagcctccatcaaggcgtggcagctcatgccggtaatctcagcactttgggaggctcaggcgggaggactgattgagtccgggtgttcaagggccaacctaggcaacacagtgagaactcatctctgtaaaaaataaaaataaaacattaaaaaaaaacatgagctttgaagtgcacagggcaaaaaaaaaaaaaa

SEQ ID NO: 14656 - DNA, 3588 bp, Homo sapiens
ctggagactggaaggtccaagatcaagatactacagatttgatttctggacgttgaacatggtgtaggagtagaaaagcaacagggacggaaggagagaacttaccccttcaagcccttttataaggcactaaatcccatcattgagggcagagtcctcatagcctaatcacctcctaaatgctccatttcttaatattgttgcactgaggattaagcttcaacatgaattctgaagaggacacaaacatccaaaccatagcagtcaatgccttagcccttgatgttgctatcaacctgagattcggggatcaaggaaggacaggtaatagttaacctcttctgtgagaagtcagaaggtgatctctttaatgctttctttttaagaatttttcaaattgagactaattgcagaggttccagttgaccagcattcataggaatgaagacaaacacagagatggtgtgtctaagaaacttcaaaaggtgtagacctcctgactgaagcatattggatttatttaatttttttcactgtatttctgtcctcctacaagggaaagtcatgattacactaactgagctaaaatgcttagcagatgcccagtcatcttatcacatcttaaaaccatggtgggacgtcttctggtattacatcacactgatcatgctgctggtggccgtgctggccggagctctccagctgacgcagagcagggttctgtgctgtcttccatgcaaagtggaatttgacaatcactgtgccgtgccttgggacatcctgaaagccagcatgaacacatcctctaatcctgggacaccgcttccgctccccctccgaattcagaatgacctccaccgacagcagtactcctatattgatgccgtctgttacgagaaacagctccattggtttgcaaagtttttcccctatctggtgctcttgcacacgctcatctttgcagcctgcagcaacttttggcttcactaccccagtaccagttccaggctcgagcattttgtggccatccttcacaagtgcttcgattctccatggaccacccgcgccctttcagaaacagtggctgagcagtcagtgaggcctctgaaactctccaagtccaagattttgctttcgtcctcagggtgttcagctgacatagattccggcaaacagtcattgccctacccacagccaggtttggagtcagctggcatagaaagcccaacttccagtgtcctggacaagaaggagggtgaacaggccaaagccatctttgaaaaagtgaaaagattccgcatgcatgtggagcagaaggacatcatttatagagtatatctgaaacagataatagtcaaagtcattttgtttgtgctcatcataacttatgttccgtattttttaacccacatcactcttgaaatcgactgttcagttgatgtgcaggcttttacaggatataagcgctaccagtgtgtctattccttggcagaaatctttaaggtcctggcttcattttatgtcattttggttatactttatggtctgacctcttcctacagcctgtggtggatgctgaggagttccctgaagcaatattcctttgaggcgttaagagaaaaaagcaactacagtgacatccctgatgtcaagaatgactttgccttcatccttcatctggctgatcagtatgatcctctttattccaaacgcttctccatattcctatcagaggtcagtgagaacaaactgaaacagatcaacctcaataatgaatggacagttgagaaactgaaaagtaagcttgtgaaaaatgcccaggacaagatagaactgcatctttttatgctcaacggtcttccagacaatgtctttgagttaactgaaatggaagtgctaagcctggagcttatcccagaggtgaagctgccctctgcagtctcacagctggtcaacctcaaggagcttcgtgtgtaccattcatctctggtcgtagaccatcctgcactggcctttctagaggagaatttaaaaatcctccgcctgaaatttactgaaatgggaaaaatcccacgctgggtatttcacctcaagaatctcaaggaactttatctttcgggctgtgttctccctgaacagttgagtactatgcagttggagggctttcaggacttaaaaaatctaaggaccctgtacttgaagagcagcctctcccggatcccacaagttgttacagacctcctgccttcattgcagaaactgtcccttgataatgagggaagcaaactggttgtgttgaacaacttgaaaaagatggtcaatctgaaaagcctagaactgatcagctgtgacctggaacgcatcccacattccattttcagcctgaataatttgcatgagttagacctaagggaaaataaccttaaaactgtggaagagatcattagctttcagcatcttcagaatctttcctgcttaaagttgtggcacaataacattgcttatattcctgcacagattggggcattatctaacctagagcagctctctttggaccataataatattgagaatctgcccttgcagcttttcctatgcactaaactacattatttggatctaagctataaccacttgaccttcattccagaagaaatccagtatctgagtaatttgcagtactttgctgtgaccaacaacaatattgagatgctaccagatgggctgtttcagtgcaaaaagctgcagtgtttacttttggggaaaaatagcttgatgaatttgtcccctcatgtgggtgagctgtcaaaccttactcatctggagctcattggtaattacctggaaacacttcctcctgaactagaaggatgtcagtccctaaaacggaactgtctgattgttgaggagaacttgctcaatactcttcctctccctgtaacagaacgtttacagacgtgcttagacaaatgttgacttaaagaaaagagacccgtgtttcaaaatcatttttaaaagtatgctcggccgggcgtggtggctcatgcctataatcccagcactttgggaggccaagatgggcggattgcttgaggtcaggagttcgagaccagtctggccaacctggtgaaaccccatctctgctaaaactacaaaaaaattagccaggcgtggtggcgtgcgcctgtaatcccagctacttgggaggctgacgcaggggaattgcttgaaccagggaggtggaggttgcagtgagccgagattgtgccactgtacaccagcctgggtgacagagcaagactcttatctcaaaaaaaaaaaaaaatgctccagggctttaaatgagaagtaaaattttctaagttaataaagatgaagaatgggtgactattatgatgaaccataactaaatgtcttattaaagcaactgagtgtctagccctaaattaaccaggtaaaaactgttaacactaacctgaagttttgtgaataactgttctttaacttattgagatgttgcaagaaatgcacatccagggtggactgggagctatgaaatgactaaattcctccttgcagtgtttacct

SEQ ID NO: 14657 - DNA, 2148 bp, Homo sapiens
cgcgactagggtgcagcgccaggtccggtgttggggtgtccgagttgccgccggagaggagtggcctcgcccgcttgagttttgattcatcatggataatctgtcatcagaagaaattcaacagagagctcaccagattactgatgagtctctggaaagtacgaggagaatcctgggtttagccattgagtctcaggatgcaggaatcaagaccatcactatgctggatgaacaaaaggaacaactaaaccgcatagaagaaggcttggaccaaataaataaggacatgagagagacagagaagactttaacagaactcaacaaatgctgtggcctttgtgtctgcccatgtaatagcataactaatgatgccagagaagatgaaatggaagagaacctgactcaagtgggcagtatcctgggaaatctaaaagacatggccctgaacataggcaatgagattgatgctcaaaatccacaaataaaacgaatcacagacaaggctgacaccaacagagatcgtattgatattgccaatgccagagcaaagaaactcattgacagctaaagctactgctgttcttctttatcatttattcacttccgtagctcctccttgaaagttattaccttttcagagtttaagttttcggttccacgctcttctaattgggagataatatggaagaagggccagagcagttacagccctccttcttttttgttttctgttgagggccgactgctgctctgccttccttctagtattttctttctcaattcatacgcttagattggttttcatatgtcatgtttagtgttttcatcctcctcatatacttcagcaggttcttttgctttcaagatttggaagcattgccaaagacagccatgaagaaggaagctgtagaggtgttttttgttgttgtttatttttgcttttgtggttgagggaaggacaagagataagaggttgttacctcagtaaaaaccttcaggccacaaagcaaaaagttgcatagccacaacgaagatctagttggatatagtttttgatttaagttgcagttatagccaatttaggctaatgcttggttttggagcttttatacacaacgtttttgttaggcatcacagttttgcaacctctgctccaaagagaaaaatagaatgagttttctttcttttttttttttttggagtcagagtctcgctctcttgtccaggctggagtgcaatagcgcgatctgggctcactgcaacctccgcctccctggttcaagcaattctcctgccttgcctcctgagtagctgggattacaggcgtgtgtcaccacgctcggctaatttttgtatttttagtagagacagggtttcaccatgtcaagctggtcttggactcctgacgtcgtgatccacccgccttggcctcccaaagtactgggattacaggcgtgagccactgtgcctggctgagttttcttaaagtgagcttaatttctgaactcttagtgattcatatatgtacataaatctgtgatcccatttcttattgcaccattcaggaacactttatataaatgagtggctttttatttcatattattagtagtatcatggttccattacaggcctattaacatcatacattgtcattagtctttgaagaaaaaatatgtaaatatatatgtgtaacatgagaatttctctctaaagcagggcttaaaattttttggaaaagtttgacaaagcataccacatgaattcagatttacctcaatgctaagaattatgtttagttaggaaaaaggaaagtcattttgacctcaggtagaaaaatagattgctttgagttttatgtagctttagactttaaaaagttagaatttattctgtaactaaaaattatttgaaaaaattatgcctctggtttaattattggtgattacacactctttctcttacccttgtgtattgaactatgtccataatcaagttgatgtggatcctgaaaagtgttatgaacatctgattggtatttgtcacatttattttaaaattagcatctgaacacttcaaagctgtcagtgtgtattggtttcaccaataaccactgcttgatccttacaattaaattttttaactaac

SEQ ID NO: 14658 - DNA, 2307 bp, Homo sapiens
cgcgactagggtgcagcgccaggtccggtgttggggtgtccgagttgccgccggagaggagtggcctcgcccgcttgagttttgattcatcatggataatctgtcatcagaagaaattcaacagagagctcaccagattactgatgagtctctggaaagtacgaggagaatcctgggtttagccattgagtctcaggatgcaggaatcaagaccatcactatgctggatgaacaaaaggaacaactaaaccgcatagaagaaggcttggaccaaataaataaggacatgagagagacagagaagactttaacagaactcaacaaatgctgtggcctttgtgtctgcccatgtaatagaacaaagaactttgagtctggcaaggcttataagacaacatggggagatggtggagaaaactcaccttgcaatgtagtatctaaacagccaggcccggtgacaaatggtcagcttcagcaaccaacaacgggagcagccagtggtggatacattaaacgcataactaatgatgccagagaagatgaaatggaagagaacctgactcaagtgggcagtatcctgggaaatctaaaagacatggccctgaacataggcaatgagattgatgctcaaaatccacaaataaaacgaatcacagacaaggctgacaccaacagagatcgtattgatattgccaatgccagagcaaagaaactcattgacagctaaagctactgctgttcttctttatcatttattcacttccgtagctcctccttgaaagttattaccttttcagagtttaagttttcggttccacgctcttctaattgggagataatatggaagaagggccagagcagttacagccctccttcttttttgttttctgttgagggccgactgctgctctgccttccttctagtattttctttctcaattcatacgcttagattggttttcatatgtcatgtttagtgttttcatcctcctcatatacttcagcaggttcttttgctttcaagatttggaagcattgccaaagacagccatgaagaaggaagctgtagaggtgttttttgttgttgtttatttttgcttttgtggttgagggaaggacaagagataagaggttgttacctcagtaaaaaccttcaggccacaaagcaaaaagttgcatagccacaacgaagatctagttggatatagtttttgatttaagttgcagttatagccaatttaggctaatgcttggttttggagcttttatacacaacgtttttgttaggcatcacagttttgcaacctctgctccaaagagaaaaatagaatgagttttctttcttttttttttttttggagtcagagtctcgctctcttgtccaggctggagtgcaatagcgcgatctgggctcactgcaacctccgcctccctggttcaagcaattctcctgccttgcctcctgagtagctgggattacaggcgtgtgtcaccacgctcggctaatttttgtatttttagtagagacagggtttcaccatgtcaagctggtcttggactcctgacgtcgtgatccacccgccttggcctcccaaagtactgggattacaggcgtgagccactgtgcctggctgagttttcttaaagtgagcttaatttctgaactcttagtgattcatatatgtacataaatctgtgatcccatttcttattgcaccattcaggaacactttatataaatgagtggctttttatttcatattattagtagtatcatggttccattacaggcctattaacatcatacattgtcattagtctttgaagaaaaaatatgtaaatatatatgtgtaacatgagaatttctctctaaagcagggcttaaaattttttggaaaagtttgacaaagcataccacatgaattcagatttacctcaatgctaagaattatgtttagttaggaaaaaggaaagtcattttgacctcaggtagaaaaatagattgctttgagttttatgtagctttagactttaaaaagttagaatttattctgtaactaaaaattatttgaaaaaattatgcctctggtttaattattggtgattacacactctttctcttacccttgtgtattgaactatgtccataatcaagttgatgtggatcctgaaaagtgttatgaacatctgattggtatttgtcacatttattttaaaattagcatctgaacacttcaaagctgtcagtgtgtattggtttcaccaataaccactgcttgatccttacaattaaattttttaactaac

SEQ ID NO: 14659 - DNA, 3214 bp, Homo sapiens
gtacgaaagagaaacccggagggcgccggggactgggccggggtctgcagggctcagctgagcccatgagctcccagagctaacccctgaacacccaggcgggcaaagggctgatgtcggtagtccccatcctggaggggcaggctctgcgcatctgctcctggcatggcgctgcggcacctcgccctcctggctggccttctcgtgggagtcgccagcaagtccatggagaacacggacactgatgtcccagccccagaggtgctgaccaggtccactgctggtgtcagaggggcctgtgcctcgcagaggggagccctccgctgcctgctgggtgagcgcctgctcaggaatggctgggtcaggcggggcccccacggtgaggcatcctggcccgcaatgggagcacctctgccagcggtgacagcacagcgtgccgcgcatcgctatcggggagtgtagctgcggcggctccagactcccaggcggagcgggtggagggtggggacccctcactgtcctggctggggcgtttgagggaccggacctgggcccctccctggcggtgtggattctatcccgcactccgcagtcacccctggacgccctcaccgttcactgcattcaggtcacgagaaacagcacagctgtgatcaacacacaagctgagggtaccctgagccccccaggcctgtccagtctgcctgtggtcagggaatgggccctcacacacaccgtaagtgccagcacccagcgcacctgtgcagtacctgggcacctgggcgtgaattcgtcccctgaaatgccagccaggcccgggcacttcctctgtggggtcaagcggaaacccctgatggagagcctccggagacttgcagagaatgtcggtggcgctgccatggcctgcgggtgccgcctcctgggggtggtttactcttccaggcccagcttttccttggagaccgcccacccagggtcccacagggatgtgcactgtggctgtgaggcccctccttgctcccaggcccacaggggacagagggccacccgatgctgactccagaagaggccggagctgcggacattgagatgtgctcccacggcacccctcagccgctgctgctctgggcgtgagcctgcctggcaggcgcgtcctggagtttcactgccgtgtcccctccaggcccagctgcccgagtgctgtgtggatgtggtgggcgtcaacgccagctgcccaggcgcaagtctgtgtggtccaggctgttacaggcgctggaacgcggacgggagcgccagctgcgtccgctgtgggaacggaaccctcccagcctacaacggctccgagtgtagaagctttgctggcccgggtgcgccattccccatgaacagaagctcagggacccccgggcggccacatcctggggctccgcgcgtggccgcctccctcttcctgggcacgttcttcattagctccggcctcatcctctccgtagctgggttcttctacctcaagcgctccagtaaactccccagggcctgctacagaagaaacaaagctccggccctgcagcctggcgaagccgctgcaatgatccccccgccacagtcctcaggtaacagcagctgtcgcatccccctgtggggtttcccatctctgggccagtcccagggtgctctgtgggtttgtccccaaacgggtttgcctggctctggatctcggccacccctgcccgggtccccaggagacccacccacaaggcagggccagggccggatttggctggtgccccctgctctggatctcagctggatttggccggcgccccctgcccgcccccctttaatccccgtgacttccatgctctttcctgttcccgagacgtggggtctgcaggaaaggaggacccaccacgacagggcagacccccaatacctgctcctccttgaagtccagctccacccgaggacagacgcagccggcctccgccaggccctcctgagcagccatcgcttcagtggtgctgggtcaggcggacccaagagtcagcccgtacggaagccgcgctacgtcaggcgggagcggcccctggacagggccacggatcccgctgccttcccgggggaggcccgtatcagcaatgtctgacctggaggccgagaccacgccacgcacttggcggcagggacccggaggccgaccccttggcgggaaccagcacaaagtgttggcatcgcccggcgcccgggacagtcctgggcacagcctcggctctgggtccctccgcctcccagcgacggacgccaaagggtcccgggccgcctgaggctcctccccaccacagccatctcgtttatcggaccaggagcaggcatccatgagacctcagagcttcagatcgaggccttggggggtccgggcccccccaggaaacacggtgaggccccagcgcctgcagccaaagctggcacgatctatggggcaggtgccgctctgcctagaaaagccaggggctctgctgccgtgccctccagagcccacagcgggcaggactcctccagcaccaccacacccagtggcccgagacccctctgagaacagtgaggctggtcctcgtgccgttccagccggtgcccggccagtggggaggacacagcctaggaaccagctgcctgagaccagggtgcctctgggctgtcctcccgcgtggcggagaccccaagcacgcagccacccatttccggagctgcaggatagagcttcctcttgatctctgtttttaagcagaaattcattgtgcagaaaagtcctccagagctctgtggccccgctcggatccgctggacccccatgcctggctgatccctgcccacgtggggcaggcccacatctaacccccacaagtcactgcctcactgcacctgccaaggctgccctggcgctgagtcctggggtccctcccggagttcctgggagaaaggcgccgtcgtggccgcctcccgcacgccaggcccgggctccaccgtgggtctcagacgccctgcggcaccggcaccgtctgctttagcatgggacccccatctgaggggtggcctggccttcggggtccccacgctcctttgcgaagtccactgtgggtgccatcatggtctccgggacctgggccagcgggaacgtgggggcactgggtgtgctgatataaagtcggcattactc

SEQ ID NO: 14660 - DNA, 1295 bp, Homo sapiens
atcaaataccagctctgccagtaagaagttgcatctcccagtgaaatgctgctgctgccatttcaactgttagctgttctctttcctggtggtaacagtgaacatgccttccaggggccgacctcctttcatgttatccagacctcgtcctttaccaatagtacctgggcacaaactcaaggctcaggctggttggatgatttgcagattcatggctgggatagcgactcaggcactgccatattcctgaagccttggtctaaaggtaactttagtgataaggaggttgctgagttagaggagatattccgagtctacatctttggattcgctcgagaagtacaagactttgccggtgatttccagatgaaatacccctttgagatccagggcatagcaggctgtgagctacattctggaggtgccatagtaagcttcctgaggggagctctaggaggattggatttcctgagtgtcaagaatgcttcatgtgtgccttccccagaaggtggcagcagggcacagaaattctgtgcactaatcatacaatatcaaggtatcatggaaactgtgagaattctcctctatgaaacctgcccccgatatctcttgggcgtcctcaatgcaggaaaagcagatctgcaaagacaagtgaagcctgaggcctggctgtccagtggccccagtcctggacctggccgtctgcagcttgtgtgccatgtctcaggattctacccaaagcccgtgtgggtgatgtggatgcggggtgagcaggagcagcagggcactcagctaggggacatcctgcccaatgctaactggacatggtatctccgagcaaccctggatgtggcagatggggaggcggctggcctgtcctgtcgggtgaagcacagcagtttagagggccaggacatcatcctctactggagaaaccccacctccattggctcaattgttttggcaataatagtgccttccttgctccttttgctatgccttgcattatggtatatgaggcgccggtcatatcagaatatcccatgagccatcatcatgtctcctctcccattcgcaataagctaccaagaagcccaagatatcagcccaaaaatcaatcttatcatatttcaaatgattttcaaatttgatgaaatcagagttttcatgtattttaaaataaattattatttaaacatcagcaaaaaagtacttaaaactgtaaatttattatgagactgtactaacagtgtgattcaccctgattttacacacattaaaatgttagaaaaaat

SEQ ID NO: 14661 - DNA, 6099 bp, Homo sapiens
aggcggcgcgtgcgtagaggggcggtgagagctaagaggggcagcgcgtgtgcagaggggcggtgtgacttaggacggggcgatggcggctgagaggagctgcgcgtgcgcgaacatgtaactggtgggatctgcggcggctcccagatgatggtcgtcctcctgggcgcgacgaccctagtgctcgtcgccgtggcgccatgggtgttgtccgcagccgcaggtggaaaaaatctaaaatctcctcaaaaagtagaggtcgacatcatagatgacaactttatcctgaggtggaacaggagcgatgagtctgtcgggaatgtgactttttcattcgattatcaaaaaactgggatggataattggataaaattgtctgggtgtcagaatattactagtaccaaatgcaacttttcttcactcaagctgaatgtttatgaagaaattaaattgcgtataagagcagaaaaagaaaacacttcttcatggtatgaggttgactcatttacaccatttcgcaaagctcagattggtcctccagaagtacatttagaagctgaagataaggcaatagtgatacacatctctcctggaacaaaagatagtgttatgtgggctttggatggtttaagctttacatatagcttagttatctggaaaaactcttcaggtgtagaagaaaggattgaaaatatttattccagacataaaatttataaactctcaccagagactacttattgtctaaaagttaaagcagcactacttacgtcatggaaaattggtgtctatagtccagtacattgtataaagaccacagttgaaaatgaactacctccaccagaaaatatagaagtcagtgtccaaaatcagaactatgttcttaaatgggattatacatatgcaaacatgacctttcaagttcagtggctccacgcctttttaaaaaggaatcctggaaaccatttgtataaatggaaacaaatacctgactgtgaaaatgtcaaaactacccagtgtgtctttcctcaaaacgttttccaaaaaggaatttaccttctccgcgtacaagcatctgatggaaataacacatctttttggtctgaagagataaagtttgatactgaaatacaagctttcctacttcctccagtctttaacattagatcccttagtgattcattccatatctatatcggtgctccaaaacagtctggaaacacgcctgtgatccaggattatccactgatttatgaaattattttttgggaaaacacttcaaatgctgagagaaaaattatcgagaaaaaaactgatgttacagttcctaatttgaaaccactgactgtatattgtgtgaaagccagagcacacaccatggatgaaaagctgaataaaagcagtgtttttagtgacgctgtatgtgagaaaacaaaaccaggaaatacctctaaaatttggcttatagttggaatttgtattgcattatttgctctcccgtttgtcatttatgctgcgaaagtcttcttgagatgcatcaattatgtcttctttccatcacttaaaccttcttccagtatagatgagtatttctctgaacagccattgaagaatcttctgctttcaacttctgaggaacaaatcgaaaaatgtttcataattgaaaatataagcacaattgctacagtagaagaaactaatcaaactgatgaagatcataaaaaatacagttcccaaactagccaagattcaggaaattattctaatgaagatgaaagcgaaagtaaaacaagtgaagaactacagcaggactttgtatgaccagaaatgaactgtgtcaagtataaggtttttcagcaggagttacactgggagcctgaggtcctcaccttcctctcagtaactacagagaggacgtttccctgtttagggaaagaaaaaacatcttcagatcataggtcctaaaaatacgggcaagctcttaactatttaaaaatgaaattacaggcccgggcacggtggctcacacctgtaatcccagcactttgggaggctgaggcaggcagatcatgaggtcaagagatcgagaccagcctggccaacgtggtgaaaccccatctctactaaaaatacaaaaattagccgggtgtggtggcgcgcgcctgttgtcttagctactcaggaggctgaggcaggagaatcgcttgaaaacaggaggtggaggttgcagtgagccgagatcacgccactgcactccagcctggtgacagcgtgagactctttaaaaaaagaaattaaaagagttgagacaaacgtttcctacattcttttccatgtgtaaaatcatgaaaaagcctgtcaccggacttgcattggatgagatgagtcagaccaaaacagtggccacccgtcttcctcctgtgagcctaagtgcagccgtgctagctgcgcaccgtggctaaggatgacgtctgtgttcctgtccatcactgatgctgctggctactgcatgtgccacacctgtctgttcgccattcctaacattctgtttcattcttcctcgggagatatttcaaacatttggtcttttcttttaacactgagggtaggcccttaggaaatttatttaggaaagtctgaacacgttatcacttggttttctggaaagtagcttaccctagaaaacagctgcaaatgccagaaagatgatccctaaaaatgttgagggacttctgttcattcatcccgagaacattggcttccacatcacagtatctacccttacatggtttaggattaaagccaggcaatcttttactatgcattaagacctctgattcaaaacttattagaacagtagcttctgctggaatttgcaatcactgaagtcatagaaaataggtaactatctaattagagaaataattgttgtattttaagatctgagagtgtgtacaagttttagtatacatgccatgccagaagatagtgtatgcaagaagtcttgggaccagaaaatggcaatgataggagactgacatagaagaagaatgcttccctaggaaaaaggtcgctggctttggtgcaagaggaagaagaatgttccactggaagcctgagcacctaatcagctctcagtgatcaacccactcttgttatgggtggtctctgtcactttgaatgccaggctggcttctcgtctagcagtattcagataccccttctgctcagcctgcttggcgttaaaatacaaatcattgaactgagggggaaaaatgtaactaggaagaaaaacccaatttaagaaattacataatgctttccaaaggcacctacaacttagttttaaattacttgctactggggattacccatggatatccttaataggcaggaagtctgggaattctggtggcctctagggcagtgttctcacagcaccgttccgacagggaccagtgaaagaaaagagacaaagttagaacgtgctggggagcggccatttctaaggccagtctggtttaagtagtcatttctgctgaaaaaacagatgatcctggtggaagaaaaggttgaaggcagctgccctcgggagggctgtgatgctcggcacatcctgcctggcacatacacgtgtctgcaggccacaccgtgcatgtccccagacctgccgcctggcttctggagtgcttcaagcagagcatggtgggtcattgaggagacccaggaatctcatctgagaacccactctctgccggagaaccccatggtgacacattttcatctttctgaccagaggctgtttttttttttttttgagacagtctcattctgttgcccaggctggagtgcagtggcttgatctcggctcactgcaacctcgcctcccgggttcaagcaattctctgccgcagcctccagagtagctgggataacaggtgcccaccaccacaccccactaatttttgtatttgtatttttagtagagatggggtttcaccatgttggtcaggctggtcttggactcctgacctcatgctccacccgcttcggcctcccaaagttctgggattacaggtgtgagccaccgtgcacggccggcctgacctttggaaaagccttgtcactttggacgtttgcgtctttgaagaggcgatgggagcatatcatgactgcctgccaccattgcttttcagactaccacaactcaatcatgctgtccaggacttctggccctgtgttcaccactgggaaaacgtacttcagactggatagcctaaaaaggagcaatgcccttgtaggatgtggagaagggaaaatacggacattaacattaaaagacaccagtgaaattgttaggtctctaggaagttggagcacaaggcttcacgctttaagaccatctgtggttttcagtgaacaagcgctgagcaccagcagcagaaaacaacaacaaaaaaacacctcgtttttaccttgtcttctagacatgaaaaggcagttgcattccactctgcattatgttctacatgttgctttatcagtatatgcttagctgtaagtgacaagtattttttctgaacagaagtttacttagaaataccatgcacttgggggtaccaattaaccgcctgaaaattagcatattgatagttcttagagagaccagatataatctaagaatttatatgaaagatttgtatcattagagccagaaataattttatattaatatataatacagattaacattatatataatatgtacctgtgtcacttctgacatgagcctgtaaacatatattcatatatgtacctgcacatgtacccacctgatgtaggtcttattcctttagtatggacttaaagtacttattcatataccttgtaactaaaaattagaacagctccctagaattgtgaacttttaagagtctgactagaaatttgcaacttataaaaaagttacttttaaaaatataagttagggctaggcacagtggctcatgcctataatctcagcacttttgggaggccaagacaggaggatcacttcaggccaggagttcaagatcaaccaacctgggtaacatggccagaccccatctctatttatatatatatatataaaacttagagtttttatcttcccctaaaagaggccgtgatatttgcagcagcctcaaattgctcttaaggggtttaggtgtgcagaagctttcctttccctacccagtaaccatgtgactactaacgtggtatattgatttattttgtttgctgtctgtctcccctgccccactgctggaacagaggctccaagaaaacagggaccttattattcattactgcatccccagtaatgaaagtacttagaaaataattattgaatgaatgaaatctaaactgtgaacctgagggtgtttgtggcagtgtttgttttactgaattgtagaaggacataaccgtgttttcagtgtttctatggaacaaacttgtacattttatttcacttgtgttttgtcttaaaccctactgctggaaacaattttatgtaataagcaatgggcccaaaagtctaggagtttttttgtacttagtgaatttgtatgcaacagagatgctgcagctgatgcctttaaaaggtattcatcatggaagagctgaggcctgtgcttggtgttccagagcccagggttgagcatcctgaaggagccactgcagccgtcactgtccccagagcctgtggagatagagcctgtttgctgctttttcttcccgctcttaagacatggctggagctcagtcttcattgaatgaagtttgctgtggtattgcatagccttgctttcttgaactaaactgtttgcccttcacaagtagttcttctttcaggattagttcgttccaaggaggctcttcagtctcacagataagtagatctctcctgctgtctggacacatttcactcggaaattgaatacaatttgtattcaggctgggaacctgaacacacacttgtgtttttaagcttcccttttttacagtggacaaggacacaaataataaataaatcatccctaatgcccaagaaaaaaa

SEQ ID NO: 14662 - DNA, 1531 bp, Homo sapiens
agtcacagagggaacacagagcctagttgtaaacggacagagacgagaggggcaagggaggacagtggatgacagggaagacgagtgggggcagagctgctcaggaccatggctgaggccatcacctatgcagatctgaggtttgtgaaggctcccctgaagaagagcatctccagccggttaggacaggacccaggggctgatgatgatggggaaatcacctacgagaatgttcaagtgcccgcagtcctaggggtgccctcaagcttggcttcttctgtactaggggacaaagcagcggtcaagtcggagcagccaactgcgtcctggagagccgtgacgtcaccagctgtcgggcggattctcccctgccgcacaacctgcctgcgatacctcctgctcggcctgctcctcacctgcctgctgttaggagtgaccgccatctgcctgggagtgcgctatctgcaggtgtctcagcagctccagcagacgaacagggttctggaagtcactaacagcagcctgaggcagcagctccgcctcaagataacgcagctgggacagagtgcagaggatctgcaggggtccaggagagagctggcgcagagtcaggaagcactacaggtggaacagagggctcatcaggcggccgaagggcagctacaggcctgccaggcagacagacagaagacgaaggagaccttgcaaagtgaggagcaacagaggagggccttggagcagaagctgagcaacatggagaacagactgaagcccttcttcacatgcggctcagcagacacctgctgtccgtcgggatggataatgcatcagaaaagctgcttttacatctcacttacttcaaaaaattggcaggagagccaaaaacaatgtgaaactctgtcttccaagctggccacattcagtgaaatttatccacaatcacactcttactacttcttaaattcactgttgccaaatggtggttcagggaattcatattggactggcctcagctctaacaaggattggaagttgactgatgatacacaacgcactaggacttatgctcaaagctcaaaatgtaacaaggtacataaaacttggtcatggtggacactggagtcagagtcatgtagaagttctcttccctacatctgtgagatgacagctttcaggtttccagattaggacagtcctttgcactgagttgacactcatgccaacaagaacctgtgcccctccttcctaacctgaggcctggggttcctcagaccatctccttcattctgggcagtgccagccaccggctgacccacacctgacacttccagccagtctgctgcctgctccctcttcctgaaactggactgttcctgggaaaagggtgaagccacctctagaagggactttggcctccccccaagaacttcccatggtagaatggggtgggggaggagggcgcacgggctgagcggataggggcggcccggagccagccaggcagttttattgaaatctttttaaataattg

SEQ ID NO: 14663 - DNA, 4066 bp, Homo sapiens
ggggctggagtggtggaaggggggtggcaggtctgcattgccgcttccctggtgccgggagcagtcgccgctgccgcctccgcccgcggccaggacccccgtcctcgcccgggactccttacccggggaacctagaccaggtctccagaggcttgtggaagagaagcaggcgacccttcctgagttatcctggcttagcctcccaatctggctccccttccccttcccattcccctgctccccctgtcccttccccatccacccaactgaactgggtataggtcaaagctcctctccttccttttccttcctaggcactcattggctaggacctgtttgctcttttttttgtgcccagagatactggaacacgcttcatctaagtaactgtggggaggggtctttttgactctacaagtccttgagcaaaaagctgaaaaagaagcaggaggtggagaagacccagtgaagtgccccaagccccatcatggaagagggcttccgagaccgggcagctttcatccgtggggccaaagacattgctaaggaagtcaaaaagcatgcggccaagaaggtggtgaagggcctggacagagtccaggacgaatattcccgaagatcgtactcccgctttgaggaggaggatgatgatgatgacttccctgctcccagtgatggttattaccgaggagaagggacccaggatgaggaggaaggtggtgcatccagtgatgctactgagggccatgacgaggatgatgagatctatgaaggggaatatcaggacattccccgggcagagtctgggggcaaaggcgagcggatggcagatggggcgcccctggctggagtaagggggggcttgagtgatggggagggtccccctgggggccggggggaggcacaacgacggaaagaacgagaagaactggcccaacagtatgaagccatcctacgggagtgtggccacggccgcttccagtggacactgtattttgtgcttggtctggcgctgatggctgacggtgtggaggtctttgtggtgggcttcgtgctgcccagcgctgagaaagacatgtgcctgtccgactccaacaaaggcatgctaggcctcatcgtctacctgggcatgatggtgggagccttcctctggggaggtctggctgaccggctgggtcggaggcagtgtctgctcatctcgctctcagtcaacagcgtcttcgccttcttctcatcttttgtccagggttacggcactttcctcttctgccgcctactttctggggttgggattggagggtccatccccattgtcttctcctatttctccgagtttctggcccaggagaaacgaggggagcatttgagctggctctgcatgttttggatgattggtggcgtgtacgcagctgctatggcctgggccatcatcccccactatgggtggagttttcagatgggttctgcctaccagttccacagctggagggtcttcgtcctcgtctgcgcctttccttctgtgtttgccattggggctctgaccacgcagcctgagagcccccgtttcttcctagagaatggaaagcatgatgaggcctggatggtgctgaagcaggtccatgataccaacatgcgagccaaaggacatcctgagcgagtgttctcagtaacccacattaagacgattcatcaggaggatgaattgattgagatccagtcggacacagggacctggtaccagcgctggggggtccgggccttgagcctaggggggcaggtttgggggaattttctctcctgttttggtcccgaatatcggcgcatcactctgatgatgatgggtgtgtggttcaccatgtcattcagctactatggcctgaccgtctggtttcctgacatgatccgccatctccaggcagtggactatgcatcccgcaccaaagtgttccccggggagcgcgtagggcatgtaacttttaacttcacgttggagaatcagatccaccgaggcgggcagtacttcaatgacaagttcattgggctgcggctcaagtcagtgtcctttgaggattccctgtttgaagagtgttattttgaggatgtcacatccagcaacacgtttttccgcaactgcacattcatcaacactgtgttctataacactgacctgttcgagtacaagtttgtgaacagccgtctgataaacagtacattcctgcacaacaaggagggctgcccgctagacgtgacagggacgggcgaaggtgcctacatggtatactttgtgagcttcctggggacactggcagtgcttcctgggaatatcgtgtctgccctgctcatggacaagatcggcaggctcagaatgcttgctggctccagcgtgatgtcctgtgtctcctgcttcttcctgtcttttgggaacagtgagtcggccatgatcgctctgctctgcctttttggcggggtcagcattgcatcctggaatgcgctggacgtgttgactgttgaactctacccctcagacaagaggaccacagcttttggcttcctgaatgccctgtgtaagctggcagctgtgctggggatcagcatcttcacatccttcgtgggaatcaccaaggctgcacccatcctctttgcctcagctgcccttgcccttggcagctctctggccctgaagctgcctgagacccgggggcaggtgctgcagtgaaggggtctctagggctttgggattggcaggcacactgtgagaccaacaactccttccttcccctccctgccctgccatcctgacctccagagccctcactccccactccccgtgtttggtgtcttagctgtgtgtgcgtgtgcgtgtgcatgtgtgtaaaccccgtgggcagggactacagggaaggctccttcatcccagttttgagatgaagctgtactccccatttcccactgcccttgactttgcacaagagaaggctgagccccatccttctccccctgttagagaggggcccttgcttccctgttccaggggttccagaataggcttcctgccttccccatcattccctctgcctaggccctggtgaaaccacaggtatgcaattatgctaggggctggggctctggtgtagaccatggaccaaaagaacttcttggagtctgaagagtgggcctcgggtgccctctcacatctcctgttggatgctgggggagaagcaataaacctcagccctctggcctccactttcctctcaatttgggctgcaaatatgaagcctgaattttatgaaattagctttctgattcttatttattaatagattaagttctgaggcagctccgcaggactgtgtgtgaatgtgtatgtatacttacatatgtgtgtgcatgtgccatggggcggggggtatcactatactgtcctcaaatataagccaagggtaatttcagcggatgcacacacaaccctgcctcccacagttcctcccctaatctggtttctgtgttgagcctgggatggaggagccctaggccagcctgggataagagtcccacagtctagggagatctgagggcatccgacaaggcccatctccttccctcctcaagaggcagaggcctcctctggagtgagaggctccacccactacagcacaggcgggaatagcacagctgccctcccatgctccctacctgtcccctcacagggaggggagcaggggagggaaagaaaccaggcatctggtcaaaccagcagatcaaaaagcacaaagagctggggcagaggcaggaagcaggggccctcctggcagctcctctgagtggggagaggttgggcagtgagtgagggacccctaatgcagggactagaagcctcagtttccccattttacccttccacacaatagcctctgtaggttaggctgccccatcccaccctactctgtgtggctgctttctttggtgccctcccctcaccccactgtagctgtgacgtgttgtagtttttagatgtttgtaaaatgtttaaaaaaatgttaaaagaaaaaaaaaaaaaaaaaaa

SEQ ID NO: 14664 - DNA, 2796 bp, Homo sapiens
ctgcggcgggggcggccccagcggatgaatgaagcggcgcgtggctgccggggaggccagagcgtggagcgctgcgcggcgcggcggccgggccctcgagacggggacggacacaccagcccctcggataccacttggccactcccgctgaggccactcccactgcgtggctgaagcctcgaggtcaccaggcggaggcgcggagatgcccctgcatcagctgggggacaagccgctcaccttccccagccccaactcagccatggaaaacgggcttgaccacaccccacccagcaggagggcatccccgggcacacccctgagccccggctccctccgctccgctgcccatagccccctggacaccagcaagcagcccctctgccagctctgggccgagaagcatggcgcccgggggacccatgaggtgcggtacgtctcggccgggcagagcgtggcgtgcggctggtgggccttcgcaccgccgtgcctgcaggtcctcaacacgcccaagggcatcctgttcttcctgtgtgcggccgcattcctgcaggggatgactgtgaatggcttcatcaacacagtcatcacctccctggagcgccgctatgacctgcacagctaccagagcgggctcatcgccagctcctacgacattgccgcctgcctctgcctcaccttcgtcagctacttcgggggctcagggcacaagccgcgctggctgggctggggcgtgctgcttatgggcacggggtcgctggtgttcgcgctgccccacttcacggctggccgctatgaggtggagttggacgcgggtgtcaggacgtgccctgccaaccccggcgcggtgtgtgcggacagcacctcgggcctgtcccgctaccagctggtcttcatgctgggccagttcctgcatggcgtgggtgccacacccctctacacgctgggcgtcacctacctggatgagaacgtcaagtccagctgctcgcccgtctacattgccatcttctacacagcggccatcctgggcccagctgccggctacctgattggaggtgccctgctgaatatctacacggaaatgggccgacggacggagctgaccaccgagagcccactgtgggtcggcgcctggtgggtcggcttcctgggctctggggccgctgctttcttcaccgccgttcccatccttggttaccctcggcagctgccaggctcccagcgctacgcggtcatgagagcggcggaaatgcaccagttgaaggacagcagccgtggggaggcgagcaacccggactttgggaaaaccatcagagacctgcctctctccatctggctcctgctgaagaaccccacgttcatcctgctctgcctggccggggccaccgaggccactctcatcaccggcatgtccacgttcagccccaagttcttggagtcccagttcagcctgagtgcctcagaagctgccaccttgtttgggtacctggtggtgccagcgggtggtggcggcaccttcctgggcggcttctttgtgaacaagctcaggctccggggctccgcggtcatcaagttctgcctgttctgcaccgttgtcagcctgctgggcatcctcgtcttctcactgcactgccccagtgtgcccatggcgggcgtcacagccagctacggcgggagcctcctgcccgaaggccacctgaacctaacggctccctgcaacgctgcctgcagctgccagccagaacactacagccctgtgtgcggctcggacggcctcatgtacttctcactgtgccacgcagggtgccctgcagccacggagacgaatgtggacggccagaaggtgtaccgagactgtagctgtatccctcagaatctttcctctggttttggccatgccactgcagggaaatgcacttcaacttgtcagagaaagcccctccttctggttttcatattcgttgtaattttctttacattcctcagcagcattcctgcactaacggcaactctacgatgtgtccgtgaccctcagagatcctttgccctgggaatccagtggattgtagttagaatactagggggcatcccggggcccatcgccttcggctgggtgatcgacaaggcctgtctgctgtggcaggaccagtgtggccagcagggctcctgcttggtgtaccagaattcggccatgagccgctacatactcatcatggggctcctgtacaaggtgctgggcgtcctcttctttgccatagcctgcttcttatacaagcccctgtcggagtcttcagatggcctggaaacttgtctgcccagccagtcctcagcccctgacagtgccacagatagccagctccagagcagcgtctgaccaccgcccgcgcccacccggccacggcgggcactcagcatttcctgatgacagaacagtgccgttgggtgatgcaatcacacgggaacttctatttgacctgcaaccttctacttaacctgtggtttaaagtcggctgtgacctcctgtccccagagctgtacggccctgcagtgggtgggaggaacttgcataaatatatatttatggacacacagtttgcatcagaacgtgtttatagaatgtgttttatacccgatcgtgtgtggtgtgcgtgaggacaaactccgcaggggctgtgaatcccactgggagggcggtgggcctgcagcctgaggaaggcttgtgtgtcctcagttaaaactgtgcatatcgaaatatattttgttatttaagcctgcgaaaaaaaaaaaaaaaaaaaa

SEQ ID NO: 14665 - DNA, 1702 bp, Homo sapiens
agactcaacaagagctccagcaaagactttcactgtagcttgacttgacctgagattaactagggaatcttgagaataaagatgagctctgaaaattgtttcgtagcagagaacagctctttgcatccggagagtggacaagaaaatgatgccaccagtccccatttctcaacacgtcatgaagggtccttccaagttcctgtcctgtgtgctgtaatgaatgtggtcttcatcaccattttaatcatagctctcattgccttatcagtgggccaatacaattgtccaggccaatacacattctcaatgccatcagacagccatgtttcttcatgctctgaggactgggttggctaccagaggaaatgctactttatttctactgtgaagaggagctggacttcagcccaaaatgcttgttctgaacatggtgctactcttgctgtcattgattctgaaaaggacatgaactttctaaaacgatacgcaggtagagaggaacactgggttggactgaaaaaggaacctggtcacccatggaagtggtcaaatggcaaagaatttaacaactggttcaacgttacagggtctgacaagtgtgtttttctgaaaaacacagaggtcagcagcatggaatgtgagaagaatttatactggatatgtaacaaaccttacaaataataaggaaacatgttcacttattgactattatagaatggaactcaaggaaatctgtgtcagtggatgctgctctgtggtccgaagtcttccatagagactttgtgaaaaaaaattttatagtgtcttgggaattttcttccaaacagaactatggaaaaaaaggaagaaattccaggaaaatctgcactgtgggcttttattgccatgagctagaagcatcacaggttgaccaataaccatgcccaagaatgagaagaatgactatgcaacctttggatgcactttatattattttgaatccagaaataatgaaataactaggcgtggacttactatttattgctgaatgactaccaacagtgagagcccttcatgcatttgcactactggaaggagttagatgttggtactagatactgaatgtaaacaaaggaattatggctggtaacataggtttttagtctaattgaatcccttaaactcagggagcatttataaatggacaaatgcttatgaaactaagatttgtaatatttctctctttttagagaaatttgccaatttactttgttatttttccccaaaaagaatgggatgatcgtgtatttatttttttacttcctcagctgtagacaggtccttttcgatggtacatatttctttgcctttataatcttttatacagtgtcttacagagaaaagacataagcaaagactatgaggaatatttgcaagacatagaatagtgttggaaaatgtgcaatatgtgatgtggcaaatctctattaggaaatattctgtaatcttcagacctagaataatactagtcttataataggtttgtgactttcctaaatcaattctattacgtgcaatacttcaatacttcatttaaaatatttttatgtgcaataaaatgtatttgtttgtattttgtgttcagtacaattataagctgtttttatatatgtgaaataaaagtagaataaacacaaaaaaaaaaaaaaaaaaaaaaaaaaaa

SEQ ID NO: 14666 - DNA, 1574 bp, Homo sapiens
attctcagcgctgggagccgccgcccccgcagctgctgccgccgccgccagggcccggactcggacgcgtggtagcctagagtcctggggagcttctgtccacctgtcctgcagaggagtcgtttccagcccggctgccccaggatgggtgagttcaacgagaagaagacaacatgtggcaccgtttgcctcaagtacctgctgtttacctacaattgctgcttctggctggctggcctggctgtcatggcagtgggcatctggacgctggccctcaagagtgactacatcagcctgctggcctcaggcacctacctggccacagcctacatcctggtggtggcgggcactgtcgtcatggtgactggggtcttgggctgctgcgccaccttcaaggagcgtcggaacctgctgcgcctgtacttcatcctgctcctcatcatctttctgctggagatcatcgctggtatcctcgcctacgcctactaccagcagctgaacacggagctcaaggagaacctgaaggacaccatgaccaagcgctaccaccagccgggccatgaggctgtgaccagcgctgtggaccagctgcagcaggagttccactgctgtggcagcaacaactcacaggactggcgagacagtgagtggatccgctcacaggaggccggtggccgtgtggtcccagacagctgctgcaagacggtggtggctctttgtgggcagcgagaccatgcctccaacatctacaaggtggagggcggctgcatcaccaagttggagaccttcatccaggagcacctgagggtcattggggctgtggggatcggcattgcctgtgtgcaggtctttggcatgatcttcacgtgctgcctgtacaggagtctcaagctggagcactactgaccctgccttgggccttgctgctgctgcacccaactactgagctgagaccactgagtaccaggggctgggctccctgatgacacccaccctgtgccatcaccataacctctggggaccccaacctcagaggcagcttcaagtgccttttgctgcgcaccaatgcccagcaggggaggtgaggggggctggcggggcgaagtttggggggtgttttgtggggctccccagacacactctctgcctggtggtcagatgcaggttggaaggggccttgctgagtggcgcaaggccgagcgttcccagcagggggagaaacccttcacaccccaggcccttcaggaactggggccttgccttgcagccacatggccccatcccagttggggaagccaggtgagctctgacccttgggcctgggcctctgcccctcccaacccagccctcgtctccctcgacagcgcccctgctgtcttccccaccgcagtcaccaccacccgaaatgccacgtggtcactgtgcactgccctgttcatgtgcctctgcggggcagggccttcctggttttgttcactgctgtacccagatgcctacaaccatccctgccacatacaggtgctcaataaacacttgtagagcagatggaaaaaaaaaaaaaaaaaaaaaaaaaa

SEQ ID NO: 14667 - DNA, 1512 bp, Homo sapiens
attctcagcgctgggagccgccgcccccgcagctgctgccgccgccgccagggcccggactcggacgcgtggtagccccaggatgggtgagttcaacgagaagaagacaacatgtggcaccgtttgcctcaagtacctgctgtttacctacaattgctgcttctggctggctggcctggctgtcatggcagtgggcatctggacgctggccctcaagagtgactacatcagcctgctggcctcaggcacctacctggccacagcctacatcctggtggtggcgggcactgtcgtcatggtgactggggtcttgggctgctgcgccaccttcaaggagcgtcggaacctgctgcgcctgtacttcatcctgctcctcatcatctttctgctggagatcatcgctggtatcctcgcctacgcctactaccagcagctgaacacggagctcaaggagaacctgaaggacaccatgaccaagcgctaccaccagccgggccatgaggctgtgaccagcgctgtggaccagctgcagcaggagttccactgctgtggcagcaacaactcacaggactggcgagacagtgagtggatccgctcacaggaggccggtggccgtgtggtcccagacagctgctgcaagacggtggtggctctttgtgggcagcgagaccatgcctccaacatctacaaggtggagggcggctgcatcaccaagttggagaccttcatccaggagcacctgagggtcattggggctgtggggatcggcattgcctgtgtgcaggtctttggcatgatcttcacgtgctgcctgtacaggagtctcaagctggagcactactgaccctgccttgggccttgctgctgctgcacccaactactgagctgagaccactgagtaccaggggctgggctccctgatgacacccaccctgtgccatcaccataacctctggggaccccaacctcagaggcagcttcaagtgccttttgctgcgcaccaatgcccagcaggggaggtgaggggggctggcggggcgaagtttggggggtgttttgtggggctccccagacacactctctgcctggtggtcagatgcaggttggaaggggccttgctgagtggcgcaaggccgagcgttcccagcagggggagaaacccttcacaccccaggcccttcaggaactggggccttgccttgcagccacatggccccatcccagttggggaagccaggtgagctctgacccttgggcctgggcctctgcccctcccaacccagccctcgtctccctcgacagcgcccctgctgtcttccccaccgcagtcaccaccacccgaaatgccacgtggtcactgtgcactgccctgttcatgtgcctctgcggggcagggccttcctggttttgttcactgctgtacccagatgcctacaaccatccctgccacatacaggtgctcaataaacacttgtagagcagatggaaaaaaaaaaaaaaaaaaaaaaaaaa

SEQ ID NO: 14668 - DNA, 6895 bp, Homo sapiens
ccgaggtgggcagcacaggctcctcgacgacttcctaggtcgcaatctccaggaaaacgaccacagggtcagcggagctagccgccgagccccgctccccgggcccttccggcggctgcgccctttcaccccggacgtgggcgggagaggaagcggctggtgatgctggaacaaacatggccgctctggcgcccgtcggctcccccgcctcccgcggtcctaggctggccgcgggcctccggctgctcccaatgctgggtttgctgcagttgctggccgagcctggcctgggccgcgtccatcacctggcactcaaggatgatgtgaggcataaagttcatctgaacacctttggcttcttcaaggatgggtacatggtggtgaatgtcagtagcctctcactgaatgagcctgaagacaaggatgtgactattggatttagcctagaccgtacaaagaatgatggcttttcttcttacctggatgaagatgtgaattactgtattttaaagaaacagtctgtctctgtcacccttttaatcctagacatctccagaagtgaggtaagagtaaagtctccaccagaagctggtacccagttaccaaagatcatcttcagcagggatgagaaagtccttggtcagagccaggagcctaatgttaaccctgcttcagcaggcaaccagacccagaagacacaagatggtggaaagtctaaaagaagtacagtggattcaaaggccatgggagagaaatccttttctgttcataataatggtggggcagtgtcatttcagtttttctttaacatcagcactgatgaccaagaaggcctttacagtctttattttcataaatgccttggaaaagaattgccaagtgacaagtttacattcagccttgatattgagatcacagagaagaatcctgacagctacctctcagcaggagaaattcctctccccaaattatacatctcaatggcctttttcttctttctttctgggaccatctggattcatatccttcgaaaacgacggaatgatgtatttaaaatccactggctgatggcggcccttcctttcaccaagtctctttccttggtgttccatgcaattgactaccactacatctcctcccagggcttccctatcgaaggctgggctgttgtgtactacataactcaccttttgaaaggggcgctactcttcatcaccattgcactcattggcactggctgggctttcattaagcacatcctttctgataaagacaaaaagatcttcatgattgtcattccactccaggtcctggcaaatgtagcctacatcatcatagagtccaccgaggagggcacgactgaatatggcttgtggaaggactctctatttctggtcgacctgttgtgttgtggtgccatcctcttcccagtggtgtggtcaatcagacatttacaagaagcatcagcaacagatggaaaagctgctattaacttagcaaagctgaaacttttcagacattattacgtcttgattgtgtgttacatatacttcactaggatcattgcatttctcctcaaactcgctgttccattccagtggaagtggctctaccagctcctggatgaaacggccacactggtcttctttgttctaacggggtataaattccgtccggcttcagataacccctacctacaactttctcaggaagaagaagacttggaaatggagtccgttgtgacaacatctggggtgatggaaagtatgaagaaagtcaagaaggtgaccaacggctccgtggagccccagggcgagtgggaaggcgccgtgtgacagagccgaccctgaggatggcactgtccaaggaaactgttaacttattcatagtcctattggacagcaggagcagctcctacagtgaactattggcaccaccgacagtgacaccagggcacatggctggagcacagtgccgcggaaacctgattttgtactctcttttatggaaacgatctgtggctgtttagaggcagctggatcctctttcaggcgggaatgggagggcgggcacagggaggaggagaggaagagaaaaggaagaattcatttttaatttaggtttctttttttcttcttcatttcggagctctaaggtgtatgcagttgtgaccccatgtgtggggaagtgtagcaaggacggctggtggagggggaaggagggtgcgaggtgtctgtctgatgctttaggaaatgtctactgaggaccctgggacttaagaagaagggcggggagagtgccattgcctgtttgggagacaaaaatgaacgaaaacaggtgactttggaaagcaaagtcaaaacccagtttaggatgtagcacctgccccaggattcctgccctcggctttgccccagacccttattccagatgctgagagtgaccaggacagcagctcctgaggcccagtggtcttctttccaacaggaaaagaaggctgtgatgtcgctgtcaggatcatgccctgtggcacagcacaggtggtgggaggtggttttctgactgagatgttgcctgatggatggaaagaaatgtatttttaagttcaaaaagcattatcctgtggcgttgcctggacatccactccctgacagcccagagcagcactgtctggcttcccttcatgcttgtggctttgttgtgtttgatcagaattttgggggaaatggaaagttttcctcaaggagcagctgggggcagaataggtagtatttaagcaaatacttaagtccaagcaaatcatccccattaaaaagcttttcctgtaggctagtaggatttctaaatagatgaattcaacagacttggtccccatagtccaagagtatgtatgtgaagaaagtgagcatgattcaacagtttcactctcagggattttaggatggcaaaatacttcacagaaactcaatgattaagttcccttccacacttccagagcttgaatgaacacaggtagccacctaaattgagcagtattgcaactcagagagaaaatcatctgaatagtaggacaagctcagaaggtacattgtgactgagggcttaaaaggagaccaaaacatggccccatcagggaagcttcttaatgcttggggggccagctaggtagggttgcttccaaaagctggagcccacccctgcctaggggttgtcagagagccacacctgcaggggaacaggtacctccgagggtgagagtcgtggtctctgggagttgttttctcacctctggcttagaagggtcaggcagaaaccacaggatgtggggtcacactcactgtcccaagtttgggaacctgaaaaagtctccattcagaacatggttgttctccctgtcccatgctatcttatcttcctaaatgactaatgaggaagcgggtgttctttttctgcactttgattcgccatctgggttctgtagggtgctctgaaggtgtgatctgccttctggctgatgtggaggaagagcaagcgccttcccaggccacagctgctcacctctcggcagatattttaggcaagcatccgtgtgtcttcccatcttcaggagaaaggtaaatgcaccctaagtgttcacttctggacctttttcaagttcacttgggactgtgtgacagaagggagttggagggaggatgggaatatttttaacactttgttttcctgtgcagaaacataataccagttttcgcagaaatgtgtctcaatctgtgactaccaaagccctcctcagtccttccctcagagggacacatttgctgtttctcccgcaagcagatgttgtggatgaggcgatagactccttggcaagaacgaaaggtgtgatgaaacctccctgctcggaagggtctccgtggaggtgtcctcatttcacatgctgggttttgcaagcgaggaagccaggcagtggaggaactagagagaggcaggcgtgtgtgtggacaagcgctggagccgcagccctcagactggcacgggaacgccagcgttgggtgttcagattccacgcgtatgtctgggctcactcacagcatggccgagtgtctgcagtgctggtcctgacccttccagagcagcagtggacagatgagataagactgtttcagaaacaaagatggccacagccttcctaacaagcaggtcatctggccatgtctgtattgtaactggtaaaaggcttcaagtcagattgatgatcaagaaaagtcaaaaccccagcccaagattgggaaagcaggtggtggttccaagcttttaaaaaattattgaagctctccatcctgttctgtgagtgtgtcttctctttctccttcacgtcatagccgtgacccaccgttcatctctgctcttgcgtaaagatgaccgatggagtccaaagccaagtggcttcaccagctgacaagccaccctcctgcagcctgagtttcacagtccactgggttcgttgtcatgcggtgtttgaatggttaagcccttgcagtatttcagatcgggcaaaaaatatcggatgcacatagcagaaccattggtggtatttatagctttgctttgtactcctcactgtttctgcctacgcaaaatatccatgtttcctctgagaaatctgttgtggactgaaagcgctgctggctgtgaaatttaataaagtgtgtatgctttgctagaaaattatttcttggacaataggaacagtcattgatctgtaaatcctggctcttaacagtgagtggccaaggacttgatcagcccatttcttggtccctcagtgctttaaaatttaagtagcactgcattttgtaatgttgaatatgactctagtgacttgtaggaggcacttgtgaggagatgcttgcttcagtgtaaaagatgctcatggcctgagtcagttgagttttctttcaagaaaccacttcagagtgaaatatccagggtttccccgccctggacatgtccagcctgcccaggcagcacacagccctgtaagtccacctcgtgtgggtgagatttcctcctgcgtgatgacctcatcgccatctctgctgtctcattccacagcctccctccctcttctctcctcctctgccctcgcccttcccccttccccatcccctccccctcctcctctgccctcgcccttacccctcccccttccccttccgctcctcctccctcctccacctctttctcctcctccttccctcctcctccctcctcttcccttctctgccatctttctccccgtgcctattgatcccacataggctcattctgggtacaccggctaaaggctttggtgcattgcagcgttttctcccagcagctgtgtgaaagatgcattttctaagctaaggagaattttctcaagagtggcatactcatgccaaatattattgctctgggccatataggctggtcttcctccacactaaaatgggtgtcttgttttggtacttaaaacagtctactccaggcatccagtccttacagaccaaggaagagcatagcgatgcctgttggaattgcagatgcattctggccttctcccccgtcctgaaacattttctttgaggaaggctcttagaacattagatagtctgctgaggttgttggcccagctccatacacccagtagaacagtggaacaactcatgcttcatgctgccaagctgctgtacttcaaaggaaacagatctagcacactgctgcacccctgcttccacactccacacttcaccccgctgcttttctctgacccgcccctggccttgtaagactcacgtaagctaagtccaggatgcctgtggcctgcggcttgattcttccctttaggattcagcaagttaatggcttcctcgctatagaagtgagactttgacttgatgcctcttggtatatcaaaaagatattcatccagaaagtaccaaatgttctgaaagacccgctcttcactccagttttccctagggtgtttctggcagggcgtttttaaaaggcatctacctgagttgacgctaatacttgtcaccacctggaacgtagttatcggtcggcaggctgaacatactccagattccccagaggccacttctgtagcccagcgatgcatctgagcctctctgcgtggtttatgcttgaaaaatagataatgcttttagatggttcactgccaggccatgggccccacacatctcaggccctgtgtgagggagcacactgagatggtgcaggagtgaatgggcatggcttggcctcgctacctcggggacctgttggagttctggcagcagggtgtctgcaggtgggacggcgttctgggcagagtcagaatggtcagaatgaaacagaacagccaactcacccacaggacagcttattttgaggcaaggttttggattttggaggaagcagccagatgaggcggtgagcctccagaaggtcagcctttggagcacgtaagatactgttacagggtccagaaatcgtgttcacatgggggctttgactcttcaaacagcttttgcagatcgtaaattgcatttgcctagtcgtgtgacctcaaaagaagtcagacatatttaatccagaaatagtttcgtttgagggagggcttgcaggtctgtaaatagcatttgctttcctggttagagattgggatgcagaaggagttttcagtattttttttaaaacactaatgatcattgaagagtatttatgtaaacatacaacgtataatgggtgggggatccgatcatggtgatgtacggggtgaattctcttgccgtgttgcaaatgtgtaaaataaagattatctggcagaaaaaaaaaaaaaaaaaaa

SEQ ID NO: 14669 - DNA, 5637 bp, Homo sapiens
aattccgggcgccagtcccgctccgcgccgcgccgctccgctccggctcgggctccggctcgcctcgggctgggctcgggctccgggggcggcgtccccgccgccgggccccgggacgggcggcgacgctccaaccatggcccgtgcccaggcgctcgtgctggcactcaccttccagctctgcgcgccggagaccgagactccggcagctggctgcaccttcgaggaggcaagtgacccagcagtgccctgcgagtacagccaggcccagtacgatgacttccagtgggagcaagtgcgaatccaccctggcacccgggcacctgcggacctgccccacggctcctacttgatggtcaacacttcccagcatgccccaggccagcgagcccatgtcatcttccagagcctgagcgagaatgatacccactgtgtgcagttcagctacttcctgtacagccgggacgggcacaggccgggcaccctgggcgtctacgtgcgcgttaatgggggccccctgggcagtgctgtgtggaatatgactggatcccacggccgtcagtggcaccaggctgagctggctgtcagcactttctggcccaatgaatatcaggtgctgtttgaggccctcatctccccagaccgcaggggctacatgggcctagatgacatcctgcttctcagctacccctgcgcaaaggccccacacttctcccgcctgggcgacgtggaggtcaacgcgggccagaacgcgtcgttccagtgcatggccgcgggcagagcggccatgcgccaacgcttcctcttgcaacggcagagcggggccctggtgccggcggcgggcgttcggcacatcagccaccggcgcttcctggccactttcccgctggctgccgtgagccgcgccgagcaggacctgtaccgctgtgtgtcccaggccccgcgcggcgcgggcgtctctaacttcgcggagctcatcgtcaaggagcccccaactcccatcgcgcccccacagctgctgcgtgctggccccacctacctcatcatccagctcaacaccaactccatcattggcgacgggccgatcgtgcgcaaggagattgagtaccgcatggcgcgcgggccctgggctgaggtgcacgccgtcagcctgcagacctacaagctgtggcacctcgaccccgacacagagtatgagatcagcgtgctgctcacgcgtcccggagacggcggcactggccgccctgggccacccctcatcagccgcaccaaatgcgcagagcccatgagggcccccaaaggcctggcttttgctgagatccaggcccgtcagctgaccctgcagtgggaaccactgggctacaacgtgacgcgttgccacacctatactgtgtcgctgtgctatcactacaccctgggcagcagccacaaccagaccatccgagagtgtgtgaagacagagcaaggtgtcagccgctacaccatcaagaacctgctgccctatcggaacgttcacgtgaggcttgtcctcactaaccctgaggggcgcaaagagggcaaggaggtcactttccagacggatgaggatgtgcccagtgggattgcagccgagtccctgaccttcactccactggaggacatgatcttcctcaagtgggaggagccccaggagcccaatggtctcatcacccagtatgagatcagctaccagagcatcgagtcatcagacccggcagtgaacgtgccaggcccacgacgtaccatctccaagctccgcaatgagacctaccatgtcttctccaacctgcacccaggcaccacctacctgttctccgtgcgggcccgcacaggcaaaggcttcggccaggcggcactcactgagataaccactaacatctctgctcccagctttgattatgccgacatgccgtcacccctgggcgagtctgagaacaccatcaccgtgctgctgaggccggcacagggccgcggtgcgcccatcagtgtgtaccaggtgattgtggaggaggagcgggcgcggaggctgcggcgggagcgaggtggacaggactgcttcccagtgccattgaccttcgaggcggcgctggcccgaggcctggtgcactacttcggggccgaactggcggccagcagtctacctgaggccatgccctttaccgtgggtgacaaccagacctaccgaggcttctggaacccaccacttgagcctaggaaggcctatctcatctacttccaggcagcaagccacctgaagggggagacccggctgaattgcatccgcattgccaggaaagctgcctgcaaggaaagcaagcggcccctggaggtgtcccagagatcggaggagatggggcttatcctgggcatctgtgcaggggggcttgctgtcctcatccttctcctgggtgccatcattgtcatcatccgcaaagggagagaccactatgcctactcctactacccgaagccggtgaacatgaccaaggccaccgtcaactaccgccaggagaagacacacatgatgagcgccgtggaccgcagcttcacagaccagagcaccctgcaggaggacgagcggctgggcctgtccttcatggacacccatggctacagcacccggggagaccagcgcagcggtggggtcactgaggccagcagcctcctggggggctccccgaggcgtccctgtggccggaagggctccccataccacacggggcagctgcaccctgcggtgcgtgtcgcagaccttctgcagcacatcaaccagatgaagacggccgagggttacggcttcaagcaggagtatgagagcttctttgaaggctgggacgccacaaagaagaaagacaaggtcaagggcagccggcaggagccaatgcctgcctatgatcggcaccgagtgaaactgcacccgatgctgggagaccccaatgccgactacattaatgccaactacatagatggttaccacaggtcaaaccacttcatagccactcaagggccgaagcctgagatggtctatgacttctggcgtatggtgtggcaggagcactgttccagcatcgtcatgatcaccaagctggtcgaggtgggcagggtgaaatgctcacggtactggccggaggactcagacacctacggggacatcaagattatgctggtgaagacagagaccctggctgagtatgtcgtgcgcacttttgccctggagcggagaggctactctgcccggcacgaggtccgccagttccacttcacagcgtggccagagcatggcgtcccctaccatgccacggggctgctggctttcatccggcgcgtgaaggcctccaccccacctgatgccgggcccattgtcatccactgcagcgcgggcaccggccgcacaggttgctatatcgtcctggatgtgatgctggacatggcagagtgtgagggcgtcgtggacatttacaactgtgtgaagactctctgctcccggcgtgtcaacatgatccagactgaggagcagtacatcttcattcatgatgcaatcctggaggcctgcctgtgtggggagaccaccatccctgtcagtgagttcaaggccacctacaaggagatgatccgcattgatcctcagagtaattcctcccagctgcgggaagagttccagacgctgaactcggtcaccccgccgctggacgtggaggagtgcagcatcgccctgttgccccggaaccgcgacaagaaccgcagcatggacgtcctgccgcccgaccgctgcctgcccttcctcatctccactgatggggactccaacaactacattaatgcagccctgactgacagctacacacggagtgcggccttcatcgtgaccctgcacccgctgcagagcaccacgcccgacttctggcggctggtctacgattacgggtgcacctccatcgtcatgctcaaccagctgaaccagtccaactccgcctggccctgcctgcagtactggccagagccaggccggcagcaatatggcctcatggaggtggagtttatgtcgggcacagctgatgaagacttagtggctcgagtcttccgggtgcagaacatctctcggttgcaggaggggcacctgctggtgcggcacttccagttcctgcgctggtctgcataccgggacacacctgactccaagaaggccttcttgcacctgctggctgaggtggacaagtggcaggccgagagtggggatgggcgcaccatcgtgcactgcctaaacgggggaggacgcagcggcaccttctgcgcctgcgccacggtcctggagatgatccgctgccacaacttggtggacgttttctttgctgccaaaaccctccggaactacaaacccaacatggtggagaccatggatcagtaccacttttgctacgatgtggccctggagtacttggaggggctggagtcaagatagcggggccctggcctggggcacccactgcacactcagggccagacccaccatcctggactggcgaggaagatcagtgcctcctgctctgcccaaacacactcccatggggcaagcactggagtggatgctgggctatcttgctcccccttccactgtgggcagggcctttcgcttgtcccatgggcgggtggtgggccaaggaggagcttagcaagtctgcagcccagccccacctccatagggtcctgcaggcctgtgctgagaggcctggtgctgcctggcagagtgacaaaggctcaggacggctggctctgggggactcaggccaagccccttggcaccatcctggcttttggcagggatgagtgaggccctgcagagagcatcccaggccaaggttcccactcagcctgccccctctgcatgtgggtagaggatgtactgggacttggcatttaggattccatctggcccagcccctgaaggtcctggggaagcaggtctcaattctgaatagccagtggggcacactgactgtcctccccaggggaactgcagcgccctcctccccactgccccctgcagcccctgagatattttgctcactatccctccccacttgcttccctgatatgtgctctgagcttccctgaaccaggatctgcctattactgctgtgccccatggggggctccttccctgcctgacccactgttgcagaatgaagtcacctcgcccccctcttcctttaatcttcaggcctcactggcctgtcctgctcagcttgggccagtgacaatctgcaaggctgaacaacagcccctggggttgaggcccctgtggctcctggtcaggctgcccgttgtggggaggggcagtgttagagcagggctggtcataccctctggagttcagaggaagaggtaggaccagtgcttttttgtttcttttgttatttttggttgggtgggtgggaaggtctctttaaaatggggcaggccacacccccattccgtgcctcaatttccccatctgtaaactgtagatatgactactgacctacctcgcagggggctgtggggaggcataagctgatgtttgtaaagcgctttgtaaataaacgtgctctctgaatgccaaaaaaaaaaaaaaaaaaaaaa

SEQ ID NO: 14670 - DNA, 2509 bp, Homo sapiens
gtctcaaatttgcagggagggacggggtggggggtggggggaccccggttgtgcagtttgatattgagggagcccccacctactcgctggggctgcgtaatctggacgtttccaaactgaagcgaaggcgtcgggagactaggcctcagagaaccatggctactgccaagggaatcgccataggcatcgacctgggcaccacctactcctgtgtgggggtgttccagcacggcaaggtggagatcatcgccaacgaccagggcaaccgcaccacccccagctacgtggccttcacagacaccgagcggctcattggggatgcggccaagaaccaggtagcaatgaatccccagaacactgtttttgatgctaaacgtctgatcggcaggaaatttaatgatcctgttgtacaagcagatatgaaactttggccttttcaagtgattaatgaaggaggcaagcccaaagtccttgtgtcctacaaaggggagaataaagctttctaccctgaggaaatctcttcgatggtattgactaagttgaaggagactgctgaggcctttttgggccaccctgtcaccaatgcagtgattaccgtgccagcctatttcaatgactctcaacgtcaggctactaaggatgcaggtgtgattgctggacttaatgtgctaagaatcatcaatgagcccacggctgctgccattgcctatggtttagataaaggaggtcaaggagaacgacatgtcctgatttttgatctgggtggaggcacatttgatgtgtcaattctgaccatagatgatgggatttttgaggtaaaggccactgctggggacactcacctgggtggggaggactttgacaacaggcttgtgagccacttcgtggaggagttcaagaggaaacacaaaaaggacatcagccagaacaagcgagccgtgaggcggctgcgcaccgcctgcgagagggccaagaggaccctgtcgtccagcacccaggccaacctagaaattgattcactttatgaaggcattgacttctatacatccatcaccagagctcgatttgaagagttgtgtgcagacctgtttaggggtaccctggagcctgtagaaaaagcgcttcgggatgccaagatggataaggctaaaatccatgacattgttttagtagggggctccacccgcatccccaaggtgcagcggctgcttcaggactacttcaatggacgtgatctcaacaagagcatcaaccctgatgaggccgtagcatatggggctgcggtacaagcagccatcctgatgggggacaagtctgagaaggtacaggacctgctgctgctggacgtggctcccctgtccctggggctggagacggctgggggcgtgatgactgccctgataaagcgcaactccaccatccccaccaagcagacacagattttcaccacctactctgacaaccaacccggggtgctgatccaggtgtatgagggcgagagggccatgacaaaggacaacaacctgctggggcggtttgacctgactggaatccctccagcacccaggggagttcctcagatcgaggtgacgtttgacattgatgccaatggtattctcaatgtcacagccatggacaagagcaccggcaaggtgaacaagatcaccatcaccaatgacaagggccgcctgagcaaggaggagattgagcgcatggttctggatgctgagaaatataaagctgaagatgaggtccagagggagaaaattgctgcaaagaatgccttagaatcctatgcttttaacatgaagagtgttgtgagtgatgaaggtttgaagggcaagattagtgagtctgataaaaataaaatattggataaatgcaacgagctcctttcgtggctggaggtcaatcaactggcagagaaagatgagtttgatcataagagaaaggaattggagcagatgtgtaaccctatcatcacaaaactctaccaaggaggatgcactgggcctgcctgcggaacagggtatgtgcctggaaggcctgccacaggccccacaattgaagaagtagattaattctttttagaactgaagcatcctaggatgcctctacatgtatttcattcccctcatcttcaaacatcattattattcttgaccagacctgaatctaagttaccatcccttggaaattctggagaaggagtctcatgcaccacctatcacactccctcacatcctgtttctgactttggaatggactcaggaaaactaggcccctctttaaaccgtgtgatgtatttgaatgtctgttatttccagccaccctaacattcttcttcctgtgtggatgcttatttgtcaatcagtaaatttgttcgtaaagaaaattacttctggtatttaggctgtgaatgtaccttgaaggggagagttcatggagagagcatgtgttctctgattgtgaggtcactgtgaatgattaaattggtaagggtaaagta

SEQ ID NO: 14671 - DNA, 2276 bp, Homo sapiens
ctcattgaactcgcctgcagctcttgggttttttgtggcttccttcgttattggagccaggcctacaccccagcaaccatgtccaagggacctgcagttggtattgatcttggcaccacctactcttgtgtgggtgttttccagcacggaaaagtcgagataattgccaatgatcagggaaaccgaaccactccaagctatgtcgcctttacggacactgaacggttgatcggtgatgccgcaaagaatcaagttgcaatgaaccccaccaacacagtttttgatgccaaacgtctgattggacgcagatttgatgatgctgttgtccagtctgatatgaaacattggccctttatggtggtgaatgatgctggcaggcccaaggtccaagtagaatacaagggagagaccaaaagcttctatccagaggaggtgtcttctatggttctgacaaagatgaaggaaattgcagaagcctaccttgggaagactgttaccaatgctgtggtcacagtgccagcttactttaatgactctcagcgtcaggctaccaaagatgctggaactattgctggtctcaatgtacttagaattattaatgagccaactgctgctgctattgcttacggcttagacaaaaaggttggagcagaaagaaacgtgctcatctttgacctgggaggtggcacttttgatgtgtcaatcctcactattgaggatggaatctttgaggtcaagtctacagctggagacacccacttgggtggagaagattttgacaaccgaatggtcaaccattttattgctgagtttaagcgcaagcataagaaggacatcagtgagaacaagagagctgtaagacgcctccgtactgcttgtgaacgtgctaagcgtaccctctcttccagcacccaggccagtattgagatcgattctctctatgaaggaatcgacttctatacctccattacccgtgcccgatttgaagaactgaatgctgacctgttccgtggcaccctggacccagtagagaaagcccttcgagatgccaaactagacaagtcacagattcatgatattgtcctggttggtggttctactcgtatccccaagattcagaagcttctccaagacttcttcaatggaaaagaactgaataagagcatcaaccctgatgaagctgttgcttatggtgcagctgtccaggcagccatcttgtctggagacaagtctgagaatgttcaagatttgctgctcttggatgtcactcctctttcccttggtattgaaactgctggtggagtcatgactgtcctcatcaagcgtaataccaccattcctaccaagcagacacagaccttcactacctattctgacaaccagcctggtgtgcttattcaggtttatgaaggcgagcgtgccatgacaaaggataacaacctgcttggcaagtttgaactcacaggcatacctcctgcaccccgaggtgttcctcagattgaagtcacttttgacattgatgccaatggtatactcaatgtctctgctgtggacaagagtacgggaaaagagaacaagattactatcactaatgacaagggccgtttgagcaaggaagacattgaacgtatggtccaggaagctgagaagtacaaagctgaagatgagaagcagagggacaaggtgtcatccaagaattcacttgagtcctatgccttcaacatgaaagcaactgttgaagatgagaaacttcaaggcaagattaacgatgaggacaaacagaagattctggacaagtgtaatgaaattatcaactggcttgataagaatcagactgctgagaaggaagaatttgaacatcaacagaaagagctggagaaagtttgcaaccccatcatcaccaagctgtaccagagtgcaggaggcatgccaggaggaatgcctgggggatttcctggtggtggagctcctccctctggtggtgcttcctcagggcccaccattgaagaggttgattaagccaaccaagtgtagatgtagcattgttccacacatttaaaacatttgaaggacctaaattcgtagcaaattctgtggcagttttaaaaagttaagctgctatagtaagttactgggcattctcaatacttgaatatggaacatatgcacaggggaaggaaataacattgcactttataaacactgtattgtaagtggaaaatgcaatgtcttaaataaaactatttaaaattggcaccataaaaaaaaaaaaaaaa

SEQ ID NO: 14672 - DNA, 1817 bp, Homo sapiens
ctcattgaactcgcctgcagctcttgggttttttgtggcttccttcgttattggagccaggcctacaccccagcaaccatgtccaagggacctgcagttggtattgatcttggcaccacctactcttgtgtgggtgttttccagcacggaaaagtcgagataattgccaatgatcagggaaaccgaaccactccaagctatgtcgcctttacggacactgaacggttgatcggtgatgccgcaaagaatcaagttgcaatgaaccccaccaacacagtttttgatgccaaacgtctgattggacgcagatttgatgatgctgttgtccagtctgatatgaaacattggccctttatggtggtgaatgatgctggcaggcccaaggtccaagtagaatacaagggagagaccaaaagcttctatccagaggaggtgtcttctatggttctgacaaagatgaaggaaattgcagaagcctaccttgggaagactgttaccaatgctgtggtcacagtgccagcttactttaatgactctcagcgtcaggctaccaaagatgctggaactattgctggtctcaatgtacttagaattattaatgagccaactgctgctgctattgcttacggcttagacaaaaaggttggagcagaaagaaacgtgctcatctttgacctgggaggtggcacttttgatgtgtcaatcctcactattgaggatggaatctttgaggtcaagtctacagctggagacacccacttgggtggagaagattttgacaaccgaatggtcaaccattttattgctgagtttaagcgcaagcataagaaggacatcagtgagaacaagagagctgtaagacgcctccgtactgcttgtgaacgtgctaagcgtaccctctcttccagcacccaggccagtattgagatcgattctctctatgaaggaatcgacttctatacctccattacccgtgcccgatttgaagaactgaatgctgacctgttccgtggcaccctggacccagtagagaaagcccttcgagatgccaaactagacaagtcacagattcatgatattgtcctggttggtggttctactcgtatccccaagattcagaagcttctccaagacttcttcaatggaaaagaactgaataagagcatcaaccctgatgaagctgttgcttatggtgcagctgtccaggcagccatcttgtctggagacaagtctgagaatgttcaagatttgctgctcttggatgtcactcctctttcccttggtattgaaactgctggtggagtcatgactgtcctcatcaagcgtaataccaccattcctaccaagcagacacagaccttcactacctattctgacaaccagcctggtgtgcttattcaggtttatgaaggcgagcgtgccatgacaaaggataacaacctgcttggcaagtttgaactcacaggcatgccaggaggaatgcctgggggatttcctggtggtggagctcctccctctggtggtgcttcctcagggcccaccattgaagaggttgattaagccaaccaagtgtagatgtagcattgttccacacatttaaaacatttgaaggacctaaattcgtagcaaattctgtggcagttttaaaaagttaagctgctatagtaagttactgggcattctcaatacttgaatatggaacatatgcacaggggaaggaaataacattgcactttataaacactgtattgtaagtggaaaatgcaatgtcttaaataaaactatttaaaattggcaccataaaaaaaaaaaaaaaa

SEQ ID NO: 14673 - DNA, 2496 bp, Homo sapiens
ctctcttgcctgccgccatgtgcctttcgccttctgccgtgattgtgaggcctccccagccatatggaagttcaggatgtctgcccgtggcccggctatcggcatcgacctgggcaccacctattcgtgcgtcggggtcttccaacatggcaaggtggagatcatcgccaacgaccagggcaatcgcaccacccccagctacgtggccttcacggacaccgagcgcctcatcggcgacgccgccaagaaccaggtggccatgaaccccaccaacaccatcttcgacgccaagaggctgattggacggaaattcgaggatgccacagtgcagtcggatatgaaacactggccgttccgggtggtgagcgagggaggcaagcccaaagtgcaagtagagtacaagggggagaccaagaccttcttcccagaggagatatcctccatggtcctcacgaagatgaaggagatcgcggaagcctacctggggggcaaggtgcacagcgcggtcataacggtcccggcctatttcaacgactcgcagcgccaggccaccaaggacgcaggcaccatcacggggctcaatgtgctgcgcatcatcaacgagcccacggcggcggccatcgcctacggcctggacaagaagggctgcgcgggcggcgagaagaacgtgctcatctttgacctgggcggtggcactttcgacgtgtccatcctgaccatcgaggatggcatcttcgaggtgaagtccacggccggcgacacccacctgggcggtgaggacttcgacaaccgcatggtgagccacctggcggaggagttcaagcgcaagcacaagaaggacattgggcccaacaagcgcgccgtgaggcggctgcgcaccgcttgcgagcgcgccaagcgcaccctgagctcgtccacgcaggcgagcatcgagatcgactcgctctacgagggcgtggacttctatacgtccatcacgcgcgcccgcttcgaggagctcaatgccgacctctttcgcgggaccctggagccggtggagaaggcgctgcgcgacgccaagctggacaagggccagatccaggagatcgtgctggtgggcggctccactcgtatccccaagatccagaagctgctgcaggatttcttcaacggcaaggagctgaacaagagcatcaaccccgacgaggcggtggcctatggcgccgcggtgcaggcggccatcctcatcggcgacaaatcagagaatgtgcaggacctgctgctactcgacgtgaccccgttgtcgctgggcatcgagacagctggcggtgtcatgaccccactcatcaagaggaacaccacgatccccaccaagcagacgcagaccttcaccacctactcggacaaccagagcagcgtactggtgcaggtatacgagggcgaacgggccatgaccaaggacaataacctgctgggcaagttcgacctgaccgggattccccctgcgcctcgcggggtcccccaaatcgaggttaccttcgacattgacgccaatggcatccttaacgttaccgccgccgacaagagcaccggtaaggaaaacaaaatcaccatcaccaatgacaaaggtcgtctgagcaaggacgacattgaccggatggtgcaggaggcggagcggtacaaatcggaagatgaggcgaatcgcgaccgagtcgcggccaaaaacgccctggagtcctatacctacaacatcaagcagacggtggaagacgagaaactgaggggcaagattagcgagcaggacaaaaacaagatcctcgacaagtgtcaggaggtgatcaactggctcgaccgaaaccagatggcagagaaagatgagtatgaacacaagcagaaagagctcgaaagagtttgcaaccccatcatcagcaaactttaccaaggtggtcctggcggcggcagcggcggcggcggttcaggagcctccgggggacccaccatcgaagaagtggactaagcttgcactcaagtcagcgtaaacctctttgcctttctctctctctctttttttttgtttgtttctttgaaatgtccttgtgccaagtacgagatctattgttggaagtctttggtatatgcaaatgaaaggagaggtgcaacaacttagtttaattataaaagttccaaagtttgttttttaaaaacattattcgaggtttctctttaatgcattttgcgtgtttgctgacttgagcatttttgattagttcgtgcatggagatttgtttgagatgagaaaccttaagtttgcacacctgttctgtagaagcttggaaacagtaaaatatataggagcttaaattgtttatttttatgtactactttaaaactaaactgaacattgcagtaatgttaaggacaggtatactttttgcaaacaaatgcataaatgcaaatgtaaagtaaagctgaaattgatctcaaaaaaaaaaaaaaaaaaaaaaaaaaaaaaaaaaa

SEQ ID NO: 14674 - DNA, 7097 bp, Homo sapiens
gtgactcccacacgggtcatgctgttgtctcctgatccagccggccctgccaggtgaccatgcctgctctgggcccagctcttctccaggctctctgggccgggtgggtcctcaccctccagccccttccaccaactgcattcactcccaatggcacgtatctgcagcacctggcaagggaccccacctcaggcaccctctacctgggggctaccaacttcctgttccagctgagccctgggctgcagctggaggccacagtgtccaccggccctgtgctagacagcagggactgcctgccacctgtgatgcctgatgagtgcccccaggcccagcctaccaacaacccgaatcagctgctcctggtgagcccaggggccctggtggtatgcgggagcgtgcaccagggggtctgtgaacagcggcgcctggggcagctcgagcagctgctgctgcggccagagcggcctggggacacacaatatgtggctgccaatgatcctgcggtcagcacggtggggctggtagcccagggcttggcaggggagcccctcctgtttgtggggcgaggatacaccagcaggggtgtggggggtggcattccacccatcacaacccgggccctgtggccgcccgacccccaagctgccttctcctatgaggagacagccaagctggcagtgggccgcctctccgagtacagccaccacttcgtgagtgcctttgcacgtggggccagcgcctacttcctgttcctgcggcgggacctgcaggctcagtctagagcttttcgtgcctatgtatctcgagtgtgtctccgggaccagcactactactcctatgtggagttgcctctggcctgcgaaggtggccgctacgggctgatccaggctgcagctgtggccacgtccagggaggtggcgcatggggaggtgctctttgcagctttctcctcggctgcaccccccactgtgggccggcccccatcggcggctgctggggcatctggagcctctgccctctgtgccttccccctggatgaggtggaccggcttgctaatcgcacgcgagatgcctgctacacccgggagggtcgtgctgaggatgggaccgaggtggcctacatcgagtatgatgtcaattctgactgtgcacagctgccagtggacaccctggatgcttatccctgtggctcagaccacacgcccagccccatggccagccgggtcccgctggaagccacaccaattctggagtggccagggattcagctaacagctgtggcagtcaccatggaagatggacacaccatcgctttcctgggtgatagtcaagggcagctgcacagggtctacttgggcccagggagcgatggccacccatactccacacagagcatccagcaggggtctgcagtgagcagagacctcacctttgatgggacctttgagcacctgtatgtcatgacccagagcacacttctgaaggttcctgtggcttcctgtgctcagcacctggactgtgcatcttgccttgctcacagggacccatactgtgggtggtgcgtgctccttggcaggtgcagtcgccgttctgagtgctcgaggggccagggcccagagcagtggctatggagcttccagcctgagctgggctgtctgcaagtggcagccatgagtcctgccaacatcagccgagaggagacgagggaggttttcctatcagtgccagacctgccacccctgtggccaggggagtcatattcctgccactttggggaacatcagagtcctgccctgctgactggttctggtgtgatgtgcccctccccagaccctagtgaggccccagtgctgccgagaggagccgactacgtatccgtgagcgtggagctcagatttggcgctgttgtgatcgccaaaacttccctctctttctatgactgtgtggcggtcactgaactccgcccatctgcgcagtgccaggcctgtgtgagcagccgctgggggtgtaactggtgtgtctggcagcacctgtgcacccacaaggcctcgtgtgatgctgggcccatggttgcaagccatcagagcccgcttgtctccccagaccctcctgcaagaggtggacccagcccctccccacccacagcccccaaagccctggccacccctgctcctgacacccttcccgtggagcctggggctccctccacagccacagcttcggacatctcacctggggctagtccttccctgctcagcccctgggggccatgggcaggttctggctccatatcttcccctggctccacagggtcgcctctccatgaggagccctcccctcccagcccccaaaatggacctggaaccgctgtccctgcccccactgacttcagaccctcagccacacctgaggacctcttggcctccccgctgtcaccgtcagaggtagcagcagtgccccctgcagaccctggccccgaggctcttcatcccacagtgcccctggacctgccccctgccactgttcctgccaccactttcccaggggccatgggctccgtgaagcccgccctggactggctcacgagagaaggcggcgagctgcccgaggcggacgagtggacggggggtgacgcacccgccttctccacttccaccctcctctcaggtgatggagactcagcagagcttgagggccctcccgcccccctcatcctcccgtccagcctcgactaccagtatgacacccccgggctctgggagctggaagaggcgaccttgggggcaagctcctgcccctgtgtggagagcgttcagggctccacgttgatgccggtccatgtggagcgggaaatccggctgctaggcaggaacctgcaccttttccaggatggcccaggagacaatgagtgtgtgatggagctggagggcctcgaggtggtggttgaggcccgggtcgagtgtgagccacctccagatacccagtgccatgtcacctgccagcagcaccagctcagctatgaggctctgcagccggagctccgtgtggggctgtttctgcgtcgggccggccgtctgcgtgtggacagtgctgaggggctgcatgtggtactgtatgactgttccgtgggacatggagactgcagccgctgccaaactgccatgccccagtatggctgtgtgtggtgtgagggggagcgtccacgttgtgtgacccgggaggcctgtggtgaggctgaggctgtggccacccagtgcccagcgcccctcatccactcggtggagccactgactgggcctgtagacggaggcacccgtgtcaccatcaggggctccaacctgggccagcatgtgcaggatgtgctgggcatggtcacggtggctggagtgccctgtgctgtggatgcccaggagtacgaggtctccagcagcctcgtgtgcatcaccggggccagtggggaggaggtggccggcgccacagcggtggaggtgccgggaagaggacgtggtgtctcagaacacgactttgcctaccaggatccgaaggtccattccatcttcccggcccgcggccccagagctgggggcacccgtctcaccctgaatggctccaagctcctgactgggcggctggaggacatccgagtggtggttggagaccagccttgtcacttgctgccggagcagcagtcagaacaactgcggtgtgagaccagcccacgccccacgcctgccacgctccctgtggctgtgtggtttggggccacggagcggaggcttcaacgcggacagttcaagtataccttggaccccaacatcacctctgctggccccaccaagagcttcctcagtggaggacgtgagatatgcgtccgtggccagaatctggacgtggtacagacgccaagaatccgggtgaccgtggtctcgagaatgctgcagcccagccaggggcttggacggaggcgtcgcgtggtcccggagacggcatgttcccttggaccctcctgcagtagccagcaatttgaggagccgtgccatgtcaactcctcccagctcatcacgtgccgcacacctgccctcccaggcctgcctgaggacccctgggtccgggtggaatttatccttgacaacctggtctttgactttgcaacactgaaccccacacctttctcctatgaggccgaccccaccctgcagccactcaaccctgaggaccccaccatgccattccggcacaagcctgggagtgtgttctccgtggagggggagaacctggaccttgcaatgtccaaggaggaggtggtggctatgataggggatggcccctgtgtggtgaagacgctgacgcggcaccacctgtactgcgagccccccgtggagcagcccctgccacggcaccatgccctccgagaggcacctgactctttgcctgagttcacggtgcagatggggaacttgcgcttctccctgggtcacgtgcagtatgacggcgagagccctggggcttttcctgtggcagcccaggtgggcttgggggtgggcacctctcttctggctctgggtgtcatcatcattgtcctcatgtacaggaggaagagcaagcaggccctgagggactataagaaggttcagatccagctggagaatctggagagcagtgtgcgggaccgctgcaagaaggaattcacagacctcatgactgagatgaccgatctcaccagtgacctcctgggcagcggcatccccttcctcgactacaaggtgtatgcggagaggatcttcttccctgggcaccgcgagtcgcccttgcaccgggacctgggtgtgcctgagagcagacggcccactgtggagcaagggctggggcagctctctaacctgctcaacagcaagctcttcctcaccaagttcatccacacgctggagagccagcgcaccttttcagctcgggaccgtgcctacgtggcatctctgctcaccgtggcactgcatgggaagcttgagtatttcactgacatcctccgcactctgctcagtgacctggttgcccagtatgtggccaagaaccccaagctgatgctgcgcaggacagagactgtggtggagaagctgctcaccaactggatgtccatctgtctgtataccttcgtgagggactccgtaggggagcctctgtacatgctctttcgagggattaagcaccaagtggataaggggccagtggacagtgtgacaggcaaggccaaatacaccttgaacgacaaccgcctgctcagagaggatgtggagtaccgtcccctgaccttgaatgcactattggctgtggggcctggggcaggagaggcccagggcgtgcccgtgaaggtcctagactgtgacaccatctcccaggcaaaggagaagatgctggaccagctttataaaggagtgcctctcacccagcggccagaccctcgcacccttgatgttgagtggcggtctggggtggccgggcacctcattctttctgacgaggatgtcacttctgaggtccagggtctgtggaggcgcctgaacacactgcagcattacaaggtcccagatggagcaactgtggccctcgtcccctgcctcaccaagcatgtgctccgggaaaaccaggattatgtccctggagagcggaccccaatgctggaggatgtagatgaggggggcatccggccctggcacctggtgaagccaagtgatgagccggagccgcccaggcctcggaggggcagccttcggggcggggagcgtgagcgcgccaaggccatccctgagatctacctgacccgcctgctgtccatgaagggcaccctgcagaagttcgtggatgacctgttccaggtgattctcagcaccagccgccccgtgccgctcgctgtgaagtacttctttgacctgctggatgagcaggcccagcagcatggcatctccgaccaggacaccatccacatctggaagaccaacagcttgcctctgaggttctggatcaatataataaaaaacccgcagtttgtgttcgacgtgcaaacatctgataacatggatgcggtgctccttgtcattgcacagaccttcatggacgcctgcaccctggccgaccacaagctgggccgggactccccgatcaacaaacttctgtatgcacgggacattccccggtacaagcggatggtggaaaggtactatgcagacatcagacagactgtcccagccagcgaccaagagatgaactctgtcctggctgaactgtcctggaactactccggagacctcggggcgcgagtggccctgcatgaactctacaagtacatcaacaagtactatgaccagatcatcactgccctggaggaggatggcacggcccagaagatgcagctgggctatcggctccagcagattgcagctgctgtggaaaacaaggtcacagatctataggaacccaggagccacggcctgctgttgcttcagcctggcctgggcagccctggaagctcggaggagaggccaccttcttaggtgcctgtagtgactgacaagcagagttagtggaaggtgactcccagtctcctggtggctctggcctcggccctgctggatccacctcctagacccggggcctcaaggctcatggggtagtacccagcctgctccccgagtccagcgaccctgtgacaccggtctgcagggagttggggactaagggcttccagagagtggctggaagagactccaggcccctggggagactgtactgttcctgaacactggccttggccacactgggattcggagaggaaggaggagagccccatgcttcctgtctgcctcctccaccatccctgacctcagttgagctgcctctggccttgttgctgctgccacatcctaggtctaagagttgaacgcctctcctaggccactacaaactgacccctcagcagggctggctgccacagggctgccctgcctcataggtagccatggtgagggctatctgctgcaggggggtcttggggagagtggtgactccattgacccagcttttcattaaaggataacacactg

SEQ ID NO: 14675 - DNA, 3980 bp, Homo sapiens
tgaggagcagccacttccctgcaggctgagcggagccctggatggagcttggcacccaagcccctcatgtctgccctgctgagtctgtgttttgtgctgcccctggcggcccccggccacggcacgcagggttgggagccctgcacagacctgcgccccctggacatcctggcggaagtggtcccttctgatggcgccacaagcgggatcaggatagttcaggttcacggtgcacggggactccagctctcagtagccgccccccgcaccatgagcttcccagcatccaggattttctcccagtgtgacctcttccctgaagaattttccatcgtcgtaactttgagagttcccaatcttccacccaagaggaacgagtacctgctgacggtggtggcagaggagagcgacctgctgctgctcggcctgcggttgtcacctgcccagctgcacttcctgttccttcgcgaggacacggccggcgcctggcagacccgagtgtccttccgcagcccggccctggtggatggccgctggcacacactggtcctggctgtgtccgcaggcgtcttctccctcaccacggactgcggcctcccggtggacataatggccgatgtgcccttcccagccaccctgtcagtgaaaggagctcgattcttcgtcggcagccggaggagagccaaaggcctgttcatgggactggtgaggcaactggtcctgctgccgggctcagacgccaccccaaggctgtgtcccagcaggaacgccccgctggcggtgctgtccatcccacgggtcctgcaggctctcacggggaagccagaagataacgaggtgctaaaatatccctatgaaaccaacattcgagtgacgctgggaccccagccaccgtgtaccgaggtggaagacgcccagttctggtttgatgccagccggaagggcctgtatctgtgtgttggcaacgagtgggtctccgtgttagcagccaaagaaagactggactacgtggaggagcatcagaacttgtccaccaactcagagaccctgggcattgaggtgttccgcatccctcaggtggggctctttgtggccacagccaatcgcaaagccacatccgccgtctacaagtggaccgaagagaagttcgtctcatatcagaacatccccacgcaccaagcacaggcctggaggcatttcaccatcgggaaaaagatcttcctggcagtggctaattttgaaccagatgagaagggtcaggagttctctgtcatttacaaatggagccacagaaagctgaagtttaccccatatcagagcattgccacacacagcgcccgagactgggaggccttcgaggtggatggggagcacttcctggcggtggccaaccaccgggaaggcgacaaccacaacatcgacagtgtcatctacaagtggaacccggcaacccggctcttcgaggccaaccagaccatcgccacctccggcgcctacgactgggagttcttcagtgtggggccctactcgttcctggtggtggccaacaccttcaacggcacctccaccaaggtgcactcgcacctctacatccgactcctgggctccttccagctcttccagtccttcccgacgttcggtgctgcagactgggaggtcttccagatcggggagaggatcttcctcgctgtggcaaacagtcacagctacgatgtggagatgcaagtccagaatgattcctatgtcatcaactccgtcatctacgagctgaacgtgaccgcgcaggcctttgtcaagttccaggacattctcacctgcagtgctctggactgggagtttttctcggtgggagaagattatttcctggtggtggccaactccttcgatgggcgtaccttctcggtgaacagtattatttacaggtggcagggctacgagggcttcgtggcggtgcacagcctccccaccgtcggctgcagggactgggaggccttcagcaccacggctggtgcctacctcatctactccagcgccaaggagcccctctccagggtcctgcggctgaggacacgctgaggccgcggctgcccggcagcaactggggtggccaggtggggcgggaccccagcacctcccccaactgaccctggacgtccaggtgggcccagcctagggcatcccgggcctgggcatcaggcagggtgcaggtggggccatctgcggccctggttcgggcagggacatccatccacctctgagtccttctgagccacagccccagtgacggtctggtcttgcaggcagaggcccagagcccctgccagtgctcgcccatctgagtgtcaagcggggatttcgctgtcaaggaaccgtttctatacatttttacctcaaacaacaggacctcggttcatgtccctgcggctggcctctcgccagccactcctgcagtgtgcgtccggccgcctgagcaggtgtggtgccgtcccgccattgccgccacctatttattgtgttttatctgaacggaagtgtatttatactgctctttacaaaagcaccggtgctcctctctaggcagcgggtgggcacagcccctcaccacggacacggacagaggaccacctccccatacagagagaggcttccctcccagcctcagtttacccgtaaatgcactagcgcgaggtcagaaatcacaagcctgggcatggcctgggtcgcaccccctccccacggccccacccacagggacctcaacttctgggcccgggattttttccctattcagcagcattttaatcacatgtcctccagctgactgggactcaggctgcgtgcctccgtctgcctgtgtgctggctgtcctagctccctggtaacagcatcctctgctggctctcctgtggtcatcttgtctctgcagctgggagagctgcttgtctgtccgtcacaggcagtgaggatgagagggggtgatgggcgcaaggccccaggggtcctccctcttaacccatgtaggtgccagagaaaccacccccactccatgagaagaggctcagacagcaggctccggggccacgcagcccagaccacacctgccacggtcttccaggaacggtgctcctgcttctgcaacacaaatcggaacaggagcgatcctcagagagtttacaatgtgctttttccgccaatcagaactgtggacaaaacttcctatttcctacaccgcagctgtctgttcaccttcagctcagagagcactcctgacctttcgtaatgaaatggaagcctccccttgtctggcaaataataaactcagtgtctacttttgccggctttgggaccttcgtgtttttccggggctcaggtctcactccagccatcgctgtggccagtggagagccactcccctctgggggcagtcgccgagagcctccttcccctccgtccagccagcaaggctttcccaagcgtcctgggcaggagggttgggccctgctttccaccaagtcactcagaaggtcccaatcacacatgattggcctcattgggtcagcacctgtgaaaggaagattaaaaactcgacaccccaattcactcaaccaagaagaaaaaagctgaaagctgagtcctgcaggaagctgcctttccctttgccctaagcagacagctgcagatgagagggtcagcatctccactagtggctgctctgtgtgccccttatctcatggaaagtgccaatttactgagcacgagataaacaggtaactgactgttcccacctgctccttttctcctgcagcatggagcaatcagtcatgtgaccacaccctcctccctctgccccctccagccggcttttccccttgactgaagccttcaacatcatcttgggagagaggcacagacctgtctcctgggtgcatccttagccttggcaaaataaacttctccattgatcgagaaaaaaaaaaaaa

SEQ ID NO: 14676 - DNA, 2546 bp, Homo sapiens
cttctccagcaatcagagcgctccccctcacatcagtggcatgcttcatggagatatgctcctctcactgccctctgcaccagcaacatggattgtcagctctccatcctcctccttctcagctgctctgttctcgacagcttcggggaactgattccgcagccttccaatgaagtcaatctactggattcaaaaacaattcaaggggagctgggctggatctcttatccatcacatgggtgggaagagatcagtggtgtggatgaacattacacacccatcaggacttaccaggtgtgcaatgtcatggaccacagtcaaaacaattggctgagaacaaactgggtccccaggaactcagctcagaagatttatgtggagctcaagttcactctacgagactgcaatagcattccattggttttaggaacttgcaaggagacattcaacctgtactacatggagtctgatgatgatcatggggtgaaatttcgagagcatcagtttacaaagattgacaccattgcagctgatgaaagtttcactcaaatggatcttggggaccgtattctgaagctcaacactgagattagagaagtaggtcctgtcaacaagaagggattttatttggcatttcaagatgttggtgcttgtgttgccttggtgtctgtgagagtatacttcaaaaagtgcccatttacagtgaagaatctggctatgtttccagacacggtacccatggactcccagtccctggtggaggttagagggtcttgtgtcaacaattctaaggaggaagatcctccaaggatgtactgcagtacagaaggcgaatggcttgtacccattggcaagtgttcctgcaatgctggctatgaagaaagaggttttatgtgccaagcttgtcgaccaggtttctacaaggcattggatggtaatatgaagtgtgctaagtgcccgcctcacagttctactcaggaagatggttcaatgaactgcaggtgtgagaataattacttccgggcagacaaagaccctccatccatggcttgtacccgacctccatcttcaccaagaaatgttatctctaatataaacgagacctcagttatcctggactggagttggcccctggacacaggaggccggaaagatgttaccttcaacatcatatgtaaaaaatgtgggtggaatataaaacagtgtgagccatgcagcccaaatgtccgcttcctccctcgacagtttggactcaccaacaccacggtgacagtgacagaccttctggcacatactaactacacctttgagattgatgccgttaatggggtgtcagagctgagctccccaccaagacagtttgctgcggtcagcatcacaactaatcaggctgctccatcacctgtcctgacgattaagaaagatcggacctccagaaatagcatctctttgtcctggcaagaacctgaacatcctaatgggatcatattggactacgaggtcaaatactatgaaaagcaggaacaagaaacaagttataccattctgagggcaagaggcacaaatgttaccatcagtagcctcaagcctgacactatatacgtattccaaatccgagcccgaacagccgctggatatgggacgaacagccgcaagtttgagtttgaaactagtccagactgtatgtattatttcaatgcagtctagaggagggggcagggatcttgcaaaagatgtctgatcgtttattctcactgtttctaagttttaaacaaatgtgatacatttaaggtatattgcttgggacattgcaatttgcagagccctgtgtctgtatacagtatttgtgtttgtgtgggtgtacattttgtgtttctttttttcttgtatgcaaatcaaacatattctaatgcctgaaatgcttctgttttttttttttagccataaattgcttttgaggaacattatttaatatagtaacacacttccagtgtctgtcatttcagatattccaggttcattgcgtgattcaatgaaccacaaaaaagaaacttgctgatccatgagaatcttaattttgttttaatccttaacacattcaatagcatatcacagagagaataaggattttctaaaatgtgttttatcacttcattcacattcagaagtaatttgaatagcctgttcctttaaccccaaatttggctaaaattggcctaaaactggcaaacatttttccagtaacttttctttttttcaaatgaattttcttcatacttaaaaaagccctttgctaaaatataattttcaaaaaggtaaaattatgtctatggcactaatataaaatgagtagaagttaatgattttacttaactcatttttttctttctttctttttttttttttttttttgagacggagtcttgctctgtcacccaggctggagtacagcagagcgatctcggctcactgcaagctcctgcaagctccgcctcctggcttcacgccattctccccctcagcctcccgagtagctgggactacag

SEQ ID NO: 14677 - DNA, 5826 bp, Homo sapiens
cccgctctgcttcagcgcacgctgaagacggcactaggacccagggaagtccccgagcggggttcgcggaaaggcagccagactcctccttatctccagtgtcaaacttgacatcagcctgcgagcggagcatggtaacttctccagcaatcagagcgctccccctcacatcagtggcatgcttcatggagatatgctcctctcactgccctctgcaccagcaacatggattgtcagctctccatcctcctccttctcagctgctctgttctcgacagcttcggggaactgattccgcagccttccaatgaagtcaatctactggattcaaaaacaattcaaggggagctgggctggatctcttatccatcacatgggtgggaagagatcagtggtgtggatgaacattacacacccatcaggacttaccaggtgtgcaatgtcatggaccacagtcaaaacaattggctgagaacaaactgggtccccaggaactcagctcagaagatttatgtggagctcaagttcactctacgagactgcaatagcattccattggttttaggaacttgcaaggagacattcaacctgtactacatggagtctgatgatgatcatggggtgaaatttcgagagcatcagtttacaaagattgacaccattgcagctgatgaaagtttcactcaaatggatcttggggaccgtattctgaagctcaacactgagattagagaagtaggtcctgtcaacaagaagggattttatttggcatttcaagatgttggtgcttgtgttgccttggtgtctgtgagagtatacttcaaaaagtgcccatttacagtgaagaatctggctatgtttccagacacggtacccatggactcccagtccctggtggaggttagagggtcttgtgtcaacaattctaaggaggaagatcctccaaggatgtactgcagtacagaaggcgaatggcttgtacccattggcaagtgttcctgcaatgctggctatgaagaaagaggttttatgtgccaagcttgtcgaccaggtttctacaaggcattggatggtaatatgaagtgtgctaagtgcccgcctcacagttctactcaggaagatggttcaatgaactgcaggtgtgagaataattacttccgggcagacaaagaccctccatccatggcttgtacccgacctccatcttcaccaagaaatgttatctctaatataaacgagacctcagttatcctggactggagttggcccctggacacaggaggccggaaagatgttaccttcaacatcatatgtaaaaaatgtgggtggaatataaaacagtgtgagccatgcagcccaaatgtccgcttcctccctcgacagtttggactcaccaacaccacggtgacagtgacagaccttctggcacatactaactacacctttgagattgatgccgttaatggggtgtcagagctgagctccccaccaagacagtttgctgcggtcagcatcacaactaatcaggctgctccatcacctgtcctgacgattaagaaagatcggacctccagaaatagcatctctttgtcctggcaagaacctgaacatcctaatgggatcatattggactacgaggtcaaatactatgaaaagcaggaacaagaaacaagttataccattctgagggcaagaggcacaaatgttaccatcagtagcctcaagcctgacactatatacgtattccaaatccgagcccgaacagccgctggatatgggacgaacagccgcaagtttgagtttgaaactagtccagactctttctccatctctggtgaaagtagccaagtggtcatgatcgccatttcagcggcagtagcaattattctcctcactgttgtcatctatgttttgattgggaggttctgtggctataagtcaaaacatggggcagatgaaaaaagacttcattttggcaatgggcatttaaaacttccaggtctcaggacttatgttgacccacatacatatgaagaccctacccaagctgttcatgagtttgccaaggaattggatgccaccaacatatccattgataaagttgttggagcaggtgaatttggagaggtgtgcagtggtcgcttaaaacttccttcaaaaaaagagatttcagtggccattaagaccctgaaagttggctacacagaaaagcagaggagagacttcctgggagaagcaagcattatgggacagtttgaccaccccaatatcattcgactggaaggagttgttaccaaaagtaagccagttatgattgtcacagaatacatggagaatggttccttggatagtttcctacgtaaacacgatgcccagtttactgtcattcagctagtggggatgcttcgagggatagcatctggcatgaagtacctgtcagacatgggctatgttcaccgagacctcgctgctcggaacatcttgatcaacagtaacttggtgtgtaaggtttctgatttcggactttcgcgtgtcctggaggatgacccagaagctgcttatacaacaagaggagggaagatcccaatcaggtggacatcaccagaagctatagcctaccgcaagttcacgtcagccagcgatgtatggagttatgggattgttctctgggaggtgatgtcttatggagagagaccatactgggagatgtccaatcaggatgtaattaaagctgtagatgagggctatcgactgccaccccccatggactgcccagctgccttgtatcagctgatgctggactgctggcagaaagacaggaacaacagacccaagtttgagcagattgttagtattctggacaagcttatccggaatcccggcagcctgaagatcatcaccagtgcagccgcaaggccatcaaaccttcttctggaccaaagcaatgtggatatcactaccttccgcacaacaggtgactggcttaatggtgtctggacagcacactgcaaggaaatcttcacgggtgtggagtacagttcttgtgacacaatagccaagatttccacagatgacatgaaaaaggttggtgtcaccgtggttgggccacagaagaagatcatcagtagcattaaagctctagaaacgcaatcaaagaatggcccagttcccgtgtaaagcacgggacggaagtgcttctggacggaagtggtggctgtggaaggcgtagcatcatcctgcagacagacaataattctggagatactggtggaagttccaagtccaataagacactcaaatatgagtacaaatgccttaaaatggaattgaaaaactctttattttcccctatcatttattggatgggtgggtggggtatttttttgtaattgcttttttaaatattagttaatggattaaatttaattcttcagcgtaaaatggtgaagaactagcatatagccattgatcataaactgactatcataaaatcaaaacaagtgaaataacaaaatggacatggtggctttgtttaggtagagccacaaaagaaaagacttgtaatatttttatatacagaggaaatctgtaacaggtattttgtttcttttaaagcaagcaacacagaggaatttatacctcaaactatctggccatatttactaccttatcactgcattattctcttttatctgtttaaagcatatagagatgaagtttgtagttgttttaagtactacacatttttaaattgttagcttccttaagtatatcatgtaaagaaatgtcttaatttttgaaaaaagtacatatttattttcttttgaattgtttttattgttttctatttatgccttgatgatttaatatggatttgttacagccaagtgccaaatgctctctcaaattgtcagcaatttaactagacacagataataatgggtttctttcagattttttgaaccatccacttacatatatttttaaaaaatgaaatccttttcctgttcatacactaaccaaatctctcaaatctgttatcccaatcattgttgcctctccgtttattataaactgtatgctcacaacttagtgtaatataccagcttgtatgcaatggattttcaaccagataacatacctttcctgctctggtgcttagagactatcaactccctcctttagtgaaggagccgtgttagagcttccgagaatagctccactggagagaagtggaatcctatatagaatgctgcactaattgacaacacagcctataggccaatgcatgagtaaaaaaaaaaacaattactggctcactggctttgaaaagtcacttactattgttgctgaaacttgctgagctgtttatagagaatgatgataacagaacttttcctctgtatcactggtgtttaggtgaattaattaaacattgtgatcattagtaccaggtattattatctttaagagtcttccacttcaatgcacatggtgcagttttggtgtgtaacttagaaggattgaacttctttgaatttactggacataacattttcagaatagttggtcatctagcaaccgcctcaaaatgtgtaagcaggagagaaatttctcatcacagggatttagacttactattacataaaggctaactatgagcttgctcattaattttgaaaagatgtacctggtggatatctagctagtaatatattctgaagcaacattttagctctattgatactctttctaatgctgatatgatcttgagtataagaaatgcatatgtcactagaatggataaaataatgctgcaaacttaatgttcttatgcaaaatggaacgctaatgaaacacagcttacaatcgcaaatcaaaactcacaagtgctcatctgttgtagatttagtgtaataagacttagattgtgctccttcggatatgattgtttctcaaatcttggcaatattccttagtcaaatcaggctactagaattctgtattggatatataagagcatgaaatttttaaaaatacacttgtgattataaaattaatcacaaatttcacttatacctgctatcagcagctagaaaacattttttttttaaatcaagtattttgtgtttggaatgttagaatgagatctgaatgtggtttcaatctaattttttcccagactactattttcttttttaggtactattctgagcatactcaacaaaacccatgcatttcataaactaatagaagttgaggattgttgaatctatttcacttattttggctgtggtttccatctgaaagtagaggttgtatacaccatatactgttcttcattttattaatatttttctccttgacctctcataaatttactttacacaattcttaccctgtacatatgtaaacataagtgtacgattcttaaccatggagtagaggtactagaatgcttacggccatctctttgtacaggaactgcattgactttcagtaaacataaagccacaactcctacatgatgttatgtaccatatgatctgttttgtatcttaaatttgatttacatatattatttatttctggtaactcactcagtttatgctgtgctaaatatcaatcaagccatgtataaatgtgatatgattggcaatatgtgtttactttaaacttgtcttttcaaaatattactcagtttatgttgtacaatgtagatggcctcttactaatgtaaaatgatttgtagtggaaacatttatatttttataataaacataatgaaaatattttttacagattggaaaaaaaaaaaaaaaaaaa

SEQ ID NO: 14678 - DNA, 3429 bp, Homo sapiens
ctgggcccgggctggaagccggaagcgagcaaagtggagccgactcgaactccaccgcggaaaagaaagcctcagaacgttcgttcgctgcgtccccagccggggccgagccctccgcgacgccagccgggccatgggggccgcacgcagcccgccgtccgctgtcccggggcccctgctggggctgctcctgctgctcctgggcgtgctggccccgggtggcgcctccctgcgactcctggaccaccgggcgctggtctgctcccagccggggctaaactgcacggtcaagaatagtacctgcctggatgacagctggattcaccctcgaaacctgaccccctcctccccaaaggacctgcagatccagctgcactttgcccacacccaacaaggagacctgttccccgtggctcacatcgaatggacactgcagacagacgccagcatcctgtacctcgagggtgcagagttatctgtcctgcagctgaacaccaatgaacgtttgtgcgtcaggtttgagtttctgtccaaactgaggcatcaccacaggcggtggcgttttaccttcagccactttgtggttgaccctgaccaggaatatgaggtgaccgttcaccacctgcccaagcccatccctgatggggacccaaaccaccagtccaagaatttccttgtgcctgactgtgagcacgccaggatgaaggtaaccacgccatgcatgagctcaggcagcctgtgggaccccaacatcaccgtggagaccctggaggcccaccagctgcgtgtgagcttcaccctgtggaacgaatctacccattaccagatcctgctgaccagttttccgcacatggagaaccacagttgctttgagcacatgcaccacatacctgcgcccagaccagaagagttccaccagcgatccaacgtcacactcactctacgcaaccttaaagggtgctgtcgccaccaagtgcagatccagcccttcttcagcagctgcctcaatgactgcctcagacactccgcgactgtttcctgcccagaaatgccagacactccagaaccaattccggactacatgcccctgtgggtgtactggttcatcacgggcatctccatcctgctggtgggctccgtcatcctgctcatcgtctgcatgacctggaggctagctgggcctggaagtgaaaaatacagtgatgacaccaaatacaccgatggcctgcctgcggctgacctgatccccccaccgctgaagcccaggaaggtctggatcatctactcagccgaccaccccctctacgtggacgtggtcctgaaattcgcccagttcctgctcaccgcctgcggcacggaagtggccctggacctgctggaagagcaggccatctcggaggcaggagtcatgacctgggtgggccgtcagaagcaggagatggtggagagcaactctaagatcatcgtcctgtgctcccgcggcacgcgcgccaagtggcaggcgctcctgggccggggggcgcctgtgcggctgcgctgcgaccacggaaagcccgtgggggacctgttcactgcagccatgaacatgatcctcccggacttcaagaggccagcctgcttcggcacctacgtagtctgctacttcagcgaggtcagctgtgacggcgacgtccccgacctgttcggcgcggcgccgcggtacccgctcatggacaggttcgaggaggtgtacttccgcatccaggacctggagatgttccagccgggccgcatgcaccgcgtaggggagctgtcgggggacaactacctgcggagcccgggcggcaggcagctccgcgccgccctggacaggttccgggactggcaggtccgctgtcccgactggttcgaatgtgagaacctctactcagcagatgaccaggatgccccgtccctggacgaagaggtgtttgaggagccactgctgcctccgggaaccggcatcgtgaagcgggcgcccctggtgcgcgagcctggctcccaggcctgcctggccatagacccgctggtcggggaggaaggaggagcagcagtggcaaagctggaacctcacctgcagccccggggtcagccagcgccgcagcccctccacaccctggtgctcgccgcagaggagggggccctggtggccgcggtggagcctgggcccctggctgacggtgccgcagtccggctggcactggcgggggagggcgaggcctgcccgctgctgggcagcccgggcgctgggcgaaatagcgtcctcttcctccccgtggaccccgaggactcgccccttggcagcagcacccccatggcgtctcctgacctccttccagaggacgtgagggagcacctcgaaggcttgatgctctcgctcttcgagcagagtctgagctgccaggcccaggggggctgcagtagacccgccatggtcctcacagacccacacacgccctacgaggaggagcagcggcagtcagtgcagtctgaccagggctacatctccaggagctccccgcagccccccgagggactcacggaaatggaggaagaggaggaagaggagcaggacccagggaagccggccctgccactctctcccgaggacctggagagcctgaggagcctccagcggcagctgcttttccgccagctgcagaagaactcgggctgggacacgatggggtcagagtcagaggggcccagtgcatgagggcggctccccagggaccgcccagatcccagctttgagagaggagtgtgtgtgcacgtattcatctgtgtgtacatgtctgcatgtgtatatgttcgtgtgtgaaatgtaggctttaaaatgtaaatgtctggattttaatcccaggcatccctcctaacttttctttgtgcagcggtctggttatcgtctatccccaggggaatccacacagcccgctcccaggagctaatggtagagcgtccttgaggctccattattcgttcattcagcatttattgtgcacctactatgtggcgggcatttgggataccaagataaattgcatgcggcatggccccagccatgaaggaacttaaccgctagtgccgaggacacgttaaacgaacaggatgggccgggcacggtggctcacgcctgtaatcccagcacactgggaggccgaggcaggtggatcactctgaggtcaggagtttgagccagcctggccaacatggtgaaaccccatctccactaaaaatagaaaaattagccgggcatggtgacacatgcctgtagtcctagctacttgggaggctgaggcaggagaattgcttgaatctgggaggcagaggttgcagtgagccgagattgtgccattgcactgcagcctggatgacagagcgagactctatctcaaaaaaaaaaaaaaaaaa

SEQ ID NO: 14679 - DNA, 2486 bp, Homo sapiens
gctgtggtaagtgcatcctccttcagtctcagttctgaaaatagatcatcatggtggcaccaaagagtcacacagatgactgggctcctgggcctttctccagtaagccacagaggagtcagctgcaaatattctcttctgttctacagacctctctcctcttcctgctcatgggactaagagcctctggaaaggactcagccccaacagtggtgtcagggatcctagggggttccgtgactctccccctaaacatctcagtagacacagagattgagaacgtcatctggattggtcccaaaaatgctcttgctttcgcacgtcccaaagaaaatgtaaccattatggtcaaaagctacctgggccgactagacatcaccaagtggagttactccctgtgcatcagcaatctgactctgaatgatgcaggatcctacaaagcccagataaaccaaaggaattttgaagtcaccactgaggaggaattcaccctgttcgtctatgagcagctgcaggagccccaagtcaccatgaagtctgtgaaggtgtctgagaacttctcctgtaacatcactctaatgtgctccgtgaagggggcagagaaaagtgttctgtacagctggaccccaagggaaccccatgcttctgagtccaatggaggctccattcttaccgtctcccgaacaccatgtgacccagacctgccatacatctgcacagcccagaaccccgtcagccagagaagctccctccctgtccatgttgggcagttctgtacagatccaggagcctccagaggaggaacaacgggggagactgtggtaggggtcctgggagagccagtcaccctgccacttgcactcccagcctgccgggacacagagaaggttgtctggttgtttaacacatccatcattagcaaagagagggaagaagcagcaacggcagatccactcattaaatccagggatccttacaagaacagggtgtgggtctccagccaggactgctccctgaagatcagccagctgaagatagaggacgccggcccctaccatgcctacgtgtgctcagaggcctccagcgtcaccagcatgacacatgtcaccctgctcatctaccgcaggctgaggaagcccaaaatcacgtggagcctcaggcacagtgaggatggcatctgcaggatcagcctgacctgctccgtggaggacgggggaaacactgtcatgtacacatggaccccgctgcagaaggaagctgttgtgtcccaaggggaatcacacctcaatgtctcatggagaagcagtgaaaatcaccccaacctcacatgcacagccagcaaccctgtcagcaggagttcccaccagtttctttctgagaacatctgttcaggacctgagagaaacacaaagctttggattgggttgttcctgatggtttgccttctgtgcgttgggatcttcagctggtgcatttggaagcgaaaaggacggtgttcagtcccagccttctgttccagccaagctgaggccccagcggatacaccagaacccacagctggccacacgctatactctgtgctctcccaaggatatgagaagctggacactcccctcaggcctgccaggcaacagcctacacccacctcagacagcagctctgacagcaacctcacaactgaggaggatgaggacaggcctgaggtgcacaagcccatcagtggaagatatgaggtatttgaccaggtcactcaggagggcgctggacatgacccagcccctgagggccaagcagactatgatcccgtcactccatatgtcacggaagttgagtctgtggttggagagaacaccatgtatgcacaagtgttcaacttacagggaaagaccccagtttctcagaaggaagagagctcagccacaatctactgctccatacggaaacctcaggtggtgccaccaccacaacagaatgatcttgagattcctgaaagtcctacctatgaaaatttcacctgaaaggaaaagcagctgctgcctctctcctgggaccgtggggttggaaagtcagctggacctcatggggcctggggctcacagacagaagcacctcagaatttccttcagtgcctcagagatgcctggatgtggcccctccccctccttctcacccttaaggactcccaaacccattaatagttcagacacaggctccttcttggagcctatgggcttcagatgtctttgccccatttgtcacctcgcacacttatagcgtttcctcctcgaaattctaccaagactggtcaaatgttgctgaggggcctggaccagctgtcctttacaccaccttctcaacactgctgaaaagaacccaagagaattgtcacacatgacacaagatgtacataatatcatgctcactgcagtgttatttaaaataaaaggcaggaaataaaaaaaaaaaaaaaaaaaaaaaaaaaaaaa

SEQ ID NO: 14680 - DNA, 3311 bp, Homo sapiens
ggcgccgtcggagggagagtagacgtcaggcggagggagggaggcaggcaggcagggaggcagggagggagagagggaaggaagagaaggggagagaaagggggagcaaagaccgaaagagacccagagagatacagcttgagaggagaaataattaaagggggagggcgaccaggaggagaaaaaggtctgggaggaaagagagataaagagaatcggagggcagggaaatgagtttgtgcgcgtgagtgtgcgcgcgcgcgtgtgtgtgtgcaggggcgggcgcgggcgggcggggggcgggctcccgggctcccgggctcccctcctccccagcccgctcctctggctcgctcgccaactccgggccccagccgcgggcgggcgcacggcgggcggacagcatgctgagcctcctcgtctggatcctcactctctccgatactttctcccaaggtaaggacccagacccgcttcagccaggagccagctgaccagacggtggtggctggacagcgggccgtgctcccctgtgtgctgctcaactactctggaattgtgcaatggaccaaggacgggctggccctgggcatgggccagggcctcaaagcctggccacggtaccgggttgtgggctccgcagacgctgggcagtacaacctggagatcacagatgctgagctctctgacgacgcctcttacgagtgccaggccacggaggccgccctgcgctctcggcgggccaaactcaccgtgctcaaccctcctacagtgaccctgtccattgagccacagacggtgcaggagggtgagcgtgttgtctttacctgccaggccacagccaaccccgagatcttgggctacaggtgggccaaagggggtttcttgattgaagacgcccacgagagtcgctatgagacaaatgtggattattcctttttcacggagcctgtgtcttgtgaggttcacaacaaagtgggaagcaccaatgtcagcactttagtaaatgtccactttgctccccggattgtagttgaccccaaacccacaaccacagacattggctctgatgtgacccttacctgtgtctgggttgggaatccccccctcactctcacctggaccaaaaaggactcaaatatggtcctgagtaacagcaaccagctgctgctgaagtcggtgactcaggcagacgctggcacctacacctgccgggccatcgtgcctcgaatcggagtggctgagcgggaggtgccgctctatgtgaacgggccccccatcatctccagtgaggcagtgcagtatgctgtgaggggtgacggtggcaaggtggagtgtttcattgggagcacaccacccccagaccgcatagcatgggcctggaaggagaacttcttggaggtggggaccctggaacgctatacagtggagaggaccaactcaggcagtggggtgctatccacgctcaccatcaacaatgtcatggaggccgactttcagactcactacaactgcaccgcctggaacagcttcgggccaggcacagccatcatccagctggaagagcgagaggtgttacctgtgggcatcatagctggggccaccatcggcgcgagcatcctgctcatcttcttcttcatcgccttggtattcttcctctaccggcgccgcaaaggcagtcgcaaagacgtgaccctgaggaagctggatatcaaggtggagacagtgaaccgagagccacttacgatgcattctgaccgggaggatgacaccgccagcgtctccacagcaacccgggtcatgaaggccatctactcgtcgtttaaggatgatgtggatctgaagcaggacctgcgctgcgacaccatcgacacccgggaggagtatgagatgaaggaccccaccaatggctactacaacgtgcgtgcccatgaagaccgcccgtcttccagggcagtgctctatgctgactaccgtgcccctggccctgcccgcttcgacggccgcccctcatcccgtctctcccactccagcggctatgcccagctcaacacctatagccggggccctgcctctgactatggccctgagcccacaccccctggccctgctgccccagctggcactgacacaaccagccagctgtcctacgagaactatgagaagttcaactcccatcccttccctggggcagctgggtaccccacctaccgactgggctacccccaggccccaccctctggcctggagcggaccccatatgaggcgtatgaccccattggcaagtacgccacagccactcgattctcctacacctcccagcactcggactacggccagcgattccagcagcgcatgcagactcacgtgtaggggccagagcctggctggggcatctctgcggggcagaggagaaggctttcacagctgttccctgatattcagggacattgctcattgctcccttctcggaccagccttcttcctcccaccatggcaggtggggagcaggtctcccagaaacaccccgtcccgaggatggtgctctgtgcatgccccagcctcctgggcctgcccttccctcttcttcgggaggatgtgtctcttctgacctgcactcttgcctgaccctagaatggggacagggaaagtgaaggttagggaaagcagaggggggcactttttagcattccctttctatcccacccctctgatctcccataagtggaaatgggggtacccagggatgggcaggctttggcctagggacatgaagtatgggagtgggtggctgtggcacagacaggtggaaaacgggatagcctggccagtccctctgttgtctgcattcgtgccctgggtgcctctctccttcctcagggtactgcagaagggagcgaacagggtactgttcgctcttgtctacagaacagccctggcactgcattcaaatccagtcttcattcagctgggatcaaaatgccagtcaccttggctacccactgtggacagctgtctgtcagcatgcagagggatccaggaatccccccggcagcacggcccgctttccttctcctccatgctgggccagccagataagtcagggtcctggtggagaaagaaaggctaggaccatgtcctcattgacccagatactgctgtgtgctgcacagcagtgaaccaacactagagggagccacacaagcctcctctccccagtctgccccacttcctggctttaactcttgagctggtttggggagtggtgaggtaggggtgggggtgctgtaggctctttttcaaaaaaaaac

SEQ ID NO: 14681 - DNA, 2770 bp, Homo sapiens
agggcgctccaggcgacagcattgcagacgccattatcctctgtttctctgctgcaccgacctcgacgtcttgcctgtgtcccacttgttcgcggcctataggctactgcagcactggggtgtcagttgttggtccgacccagaacgcttcagttctgctctgcaaggatatataataactgattggtgtgcccgtttaataaaagaatatggaaactgaacagccagaagaaaccttccctaacactgaaaccaatggtgaatttggtaaacgccctgcagaagatatggaagaggaacaagcatttaaaagatctagaaacactgatgagatggttgaattacgcattctgcttcagagcaagaatgctggggcagtgattggaaaaggaggcaagaatattaaggctctccgtacagactacaatgccagtgtttcagtcccagacagcagtggccccgagcgcatattgagtatcagtgctgatattgaaacaattggagaaattctgaagaaaatcatccctaccttggaagagggcctgcagttgccatcacccactgcaaccagccagctcccgctcgaatctgatgctgtggaatgcttaaattaccaacactataaaggaagtgactttgactgcgagttgaggctgttgattcatcagagtctagcaggaggaattattggggtcaaaggtgctaaaattaaagaacttcgagagaacactcaaaccaccatcaagcttttccaggaatgctgtcctcattccactgacagagttgttcttattggaggaaaacccgatagggttgtagagtgcataaagatcatccttgatcttatatctgagtctcccatcaaaggacgtgcacagccttatgatcccaatttttacgatgaaacctatgattatggtggttttacaatgatgtttgatgaccgtcgcggacgcccagtgggatttcccatgcggggaagaggtggttttgacagaatgcctcctggtcggggtgggcgtcccatgcctccatctagaagagattatgatgatatgagccctcgtcgaggaccacctccccctcctcccggacgaggcggccggggtggtagcagagctcggaatcttcctcttcctccaccaccaccacctagagggggagacctcatggcctatgacagaagagggagacctggagaccgttacgacggcatggttggtttcagtgctgatgaaacttgggactctgcaatagatacatggagcccatcagaatggcagatggcttatgaaccacagggtggctccggatatgattattcctatgcagggggtcgtggctcatatggtgatcttggtggacctattattactacacaagtaactattcccaaagatttggctggatctattattggcaaaggtggtcagcggattaaacaaatccgtcatgagtcgggagcttcgatcaaaattgatgagcctttagaaggatccgaagatcggatcattaccattacaggaacacaggaccagatacagaatgcacagtatttgctgcagaacagtgtgaagcagtattctggaaagtttttctaagactagtgaagaactgaaggagtcctgcatctttttttttttatctgcttctgtttaaaaagccaacattcctctgcttcataggtgttctgcatttgaggtgtagtgaaatctttgctgttcaccagatgtaatgttttagttcttacaaacagggttgggggggggaagggcgtgcaaaaactaacattgaaattttgaaacagcagcagagtgagtggattttatttttcgttattgtggtggtttaaaaaattccccccatgtaattattgtgaacaccttgctttgtggtcactgtaacatttggggggtgggccagggaggaaaagtaacaatagtccacatgtccctggcatctgttcagagcagtgtgcagaatgtaatgctcttttgtaagaaacgttttatgatttttaaaataaatttagtgaacctatttttggtggtcattttttttttaagacagtcattttaaaatggtggctgaatttcccaacccacccccaaactaaacactaagtttaattttcagctcctctgttggacatataagtgcatctcttgttggacataggcaaaataacttggcaaacttagttctggtgatttcttgatggtttggaagtctattgctgggaagaaattccatcatacatattcatgcttataataagctggggattttttgtttgtttttgcaaatgcttgcccctacttttcaacaattttctatgttagttgtgaagaactaaggtggggagcagtactacaagttgagtaatggtatgagtatataccagaattctgattggcagcaagtttattaatcagaataacacttggttatggaagtgactaatgctgaaaaaattgattatttttattagataatttctcacctatagacttaaactgtcaatttgctctagtgtcttattagttaaactttgtaaaatatatatatacttgtttttccattgtatgcaaattgaaagaaaaagatgtaccatttctctgttgtatgttggattatgtaggaatgtttgtgtacaattcaaaaaaaaaaaagatgaaaaaagttcctgtggatgttttgtgtagtatcttggcatttgtattgatagttaaaattcacttccaaataaataaaacacccatgatgctag

SEQ ID NO: 14682 - DNA, 2830 bp, Homo sapiens
agggcgctccaggcgacagcattgcagacgccattatcctctgtttctctgctgcaccgacctcgacgtcttgcctgtgtcccacttgttcgcggcctataggctactgcagcactggggtgtcagttgttggtccgacccagaacgcttcagttctgctctgcaaggatatataataactgattggtgtgcccgtttaataaaagaatatggaaactgaacagccagaagaaaccttccctaacactgaaaccaatggtgaatttggtaaacgccctgcagaagatatggaagaggaacaagcatttaaaagatctagaaacactgatgagatggttgaattacgcattctgcttcagagcaagaatgctggggcagtgattggaaaaggaggcaagaatattaaggctctccgtacagactacaatgccagtgtttcagtcccagacagcagtggccccgagcgcatattgagtatcagtgctgatattgaaacaattggagaaattctgaagaaaatcatccctaccttggaagagggcctgcagttgccatcacccactgcaaccagccagctcccgctcgaatctgatgctgtggaatgcttaaattaccaacactataaaggaagtgactttgactgcgagttgaggctgttgattcatcagagtctagcaggaggaattattggggtcaaaggtgctaaaattaaagaacttcgagagaacactcaaaccaccatcaagcttttccaggaatgctgtcctcattccactgacagagttgttcttattggaggaaaacccgatagggttgtagagtgcataaagatcatccttgatcttatatctgagtctcccatcaaaggacgtgcacagccttatgatcccaatttttacgatgaaacctatgattatggtggttttacaatgatgtttgatgaccgtcgcggacgcccagtgggatttcccatgcggggaagaggtggttttgacagaatgcctcctggtcggggtgggcgtcccatgcctccatctagaagagattatgatgatatgagccctcgtcgaggaccacctccccctcctcccggacgaggcggccggggtggtagcagagctcggaatcttcctcttcctccaccaccaccacctagagggggagacctcatggcctatgacagaagagggagacctggagaccgttacgacggcatggttggtttcagtgctgatgaaacttgggactctgcaatagatacatggagcccatcagaatggcagatggcttatgaaccacagggtggctccggatatgattattcctatgcagggggtcgtggctcatatggtgatcttggtggacctattattactacacaagtaactattcccaaagatttggctggatctattattggcaaaggtggtcagcggattaaacaaatccgtcatgagtcgggagcttcgatcaaaattgatgagcctttagaaggatccgaagatcggatcattaccattacaggaacacaggaccagatacagaatgcacagtatttgctgcagaacagtgtgaagcagtatgcagatgttgaaggattctaatgcaagatattttttcttttttatagtgtgaagcagtattctggaaagtttttctaagactagtgaagaactgaaggagtcctgcatctttttttttttatctgcttctgtttaaaaagccaacattcctctgcttcataggtgttctgcatttgaggtgtagtgaaatctttgctgttcaccagatgtaatgttttagttcttacaaacagggttgggggggggaagggcgtgcaaaaactaacattgaaattttgaaacagcagcagagtgagtggattttatttttcgttattgtggtggtttaaaaaattccccccatgtaattattgtgaacaccttgctttgtggtcactgtaacatttggggggtgggccagggaggaaaagtaacaatagtccacatgtccctggcatctgttcagagcagtgtgcagaatgtaatgctcttttgtaagaaacgttttatgatttttaaaataaatttagtgaacctatttttggtggtcattttttttttaagacagtcattttaaaatggtggctgaatttcccaacccacccccaaactaaacactaagtttaattttcagctcctctgttggacatataagtgcatctcttgttggacataggcaaaataacttggcaaacttagttctggtgatttcttgatggtttggaagtctattgctgggaagaaattccatcatacatattcatgcttataataagctggggattttttgtttgtttttgcaaatgcttgcccctacttttcaacaattttctatgttagttgtgaagaactaaggtggggagcagtactacaagttgagtaatggtatgagtatataccagaattctgattggcagcaagtttattaatcagaataacacttggttatggaagtgactaatgctgaaaaaattgattatttttattagataatttctcacctatagacttaaactgtcaatttgctctagtgtcttattagttaaactttgtaaaatatatatatacttgtttttccattgtatgcaaattgaaagaaaaagatgtaccatttctctgttgtatgttggattatgtaggaatgtttgtgtacaattcaaaaaaaaaaaagatgaaaaaagttcctgtggatgttttgtgtagtatcttggcatttgtattgatagttaaaattcacttccaaataaataaaacacccatgatgctag

SEQ ID NO: 14683 - DNA, 2745 bp, Homo sapiens
cggcagtctcgcgcggctactgcagcactggggtgtcagttgttggtccgacccagaacgcttcagttctgctctgcaaggatatataataactgattggtgtgcccgtttaataaaagaatatggaaactgaacagccagaagaaaccttccctaacactgaaaccaatggtgaatttggtaaacgccctgcagaagatatggaagaggaacaagcatttaaaagatctagaaacactgatgagatggttgaattacgcattctgcttcagagcaagaatgctggggcagtgattggaaaaggaggcaagaatattaaggctctccgtacagactacaatgccagtgtttcagtcccagacagcagtggccccgagcgcatattgagtatcagtgctgatattgaaacaattggagaaattctgaagaaaatcatccctaccttggaagagggcctgcagttgccatcacccactgcaaccagccagctcccgctcgaatctgatgctgtggaatgcttaaattaccaacactataaaggaagtgactttgactgcgagttgaggctgttgattcatcagagtctagcaggaggaattattggggtcaaaggtgctaaaatcaaagaacttcgagagaacactcaaaccaccatcaagcttttccaggaatgctgtcctcattccactgacagagttgttcttattggaggaaaacccgatagggttgtagagtgcataaagatcatccttgatcttatatctgagtctcccatcaaaggacgtgcacagccttatgatcccaatttttacgatgaaacctatgattatggtggttttacaatgatgtttgatgaccgtcgcggacgcccagtgggatttcccatgcggggaagaggtggttttgacagaatgcctcctggtcggggtgggcgtcccatgcctccatctagaagagattatgatgatatgagccctcgtcgaggaccacctccccctcctcccggacgaggcggccggggtggtagcagagctcggaatcttcctcttcctccaccaccaccacctagagggggagacctcatggcctatgacagaagagggagacctggagaccgttacgacggcatggttggtttcagtgctgatgaaacttgggactctgcaatagatacatggagcccatcagaatggcagatggcttatgaaccacagggtggctccggatatgattattcctatgcagggggtcgtggctcatatggtgatcttggtggacctattattactacacaagtaactattcccaaagatttggctggatctattattggcaaaggtggtcagcggattaaacaaatccgtcatgagtcgggagcttcgatcaaaattgatgagcctttagaaggatccgaagatcggatcattaccattacaggaacacaggaccagatacagaatgcacagtatttgctgcagaacagtgtgaagcagtatgcagatgttgaaggattctaatgcaagatattttttcttttttatagtgtgaagcagtattctggaaagtttttctaagactagtgaagaactgaaggagtcctgcatctttttttttttatctgcttctgtttaaaaagccaacattcctctgcttcataggtgttctgcatttgaggtgtagtgaaatctttgctgttcaccagatgtaatgttttagttccttacaaacagggttgggggggggaagggcgtgcaaaaactaacattgaaattttgaaacagcagcagagtgagtggattttatttttcgttattgttggtggtttaaaaaattccccccatgtaattattgtgaacaccttgctttgtggtcactgtaacatttggggggtgggacagggaggaaaagtaacaatagtccacatgtccctggcatctgttcagagcagtgtgcagaatgtaatgctcttttgtaagaaacgttttatgatttttaaaataaatttagtgaacctatttttggtggtcattttttttttaagacagtcattttaaaatggtggctgaatttcccaacccacccccaaactaaacactaagtttaattttcagctcctctgttggacatataagtgcatctcttgttggacataggcaaaataacttggcaaacttagttctggtgatttcttgatggtttggaagtctattgctgggaagaaattccatcatacatattcatgcttataataagctggggattttttgtttgtttttgcaaatgcttgcccctacttttcaacaattttctatgttagttgtgaagaactaaggtggggagcagtactacaagttgagtaatggtatgagtatataccagaattctgattggcagcaagtttattaatcagaataacacttggttatggaagtgactaatgctgaaaaaattgattatttttattagataatttctcacctatagacttaaactgtcaatttgctctagtgtcttattagttaaactttgtaaaatatatatatacttgtttttccattgtatgcaaattgaaagaaaaagatgtaccatttctctgttgtatgttggattatgtaggaatgtttgtgtacaattcaaaaaaaaaaaagatgaaaaaagttcctgtggatgttttgtgtagtatcttggcatttgtattgatagttaaaattcacttccaaataaataaaacacccatgatgctag

SEQ ID NO: 14684 - DNA, 3632 bp, Homo sapiens
actcactgcccgggccgcccggacagggagcttcgctggcgcgcttggccggcgacaggacaggttcgggacgtccatctgtccatccgtccggagagaaattacagatccgcagccccgggatggggccggccccgctgccgctgctgctgggcctcttcctccccgcgctctggcgtagagctatcactgaggcaagggaagaagccaagccttacccgctattcccgggaccttttccagggagcctgcaaactgaccacacaccgctgttatcccttcctcacgccagtgggtaccagcctgccttgatgttttcaccaacccagcctggaagaccacatacaggaaacgtagccattccccaggtgacctctgtcgaatcaaagcccctaccgcctcttgccttcaaacacacagttggacacataatactttctgaacataaaggtgtcaaatttaattgctcaatcagtgtacctaatatataccaggacaccacaatttcttggtggaaagatgggaaggaattgcttggggcacatcatgcaattacacagttttatccagatgatgaagttacagcaataatcgcttccttcagcataaccagtgtgcagcgttcagacaatgggtcgtatatctgtaagatgaaaataaacaatgaagagatcgtgtctgatcccatctacatcgaagtacaaggacttcctcactttactaagcagcctgagagcatgaatgtcaccagaaacacagccttcaacctcacctgtcaggctgtgggcccgcctgagcccgtcaacattttctgggttcaaaacagtagccgtgttaacgaacagcctgaaaaatccccctccgtgctaactgttccaggcctgacggagatggcggtcttcagttgtgaggcccacaatgacaaagggctgaccgtgtccaagggagtgcagatcaacatcaaagcaattccctccccaccaactgaagtcagcatccgtaacagcactgcacacagcattctgatctcctgggttcctggttttgatggatactccccgttcaggaattgcagcattcaggtcaaggaagctgatccgctgagtaatggctcagtcatgatttttaacacctctgccttaccacatctgtaccaaatcaagcagctgcaagccctggctaattacagcattggtgtttcctgcatgaatgaaataggctggtctgcagtgagcccttggattctagccagcacgactgaaggagccccatcagtagcacctttaaatgtcactgtgtttctgaatgaatctagtgataatgtggacatcagatggatgaagcctccgactaagcagcaggatggagaactggtgggctaccggatatcccacgtgtggcagagtgcagggatttccaaagagctcttggaggaagttggccagaatggcagccgagctcggatctctgttcaagtccacaatgctacgtgcacagtgaggattgcagccgtcaccagagggggagttgggcccttcagtgatccagtgaaaatatttatccctgcacacggttgggtagattatgccccctcttcaactccggcgcctggcaacgcagatcctgtgctcatcatctttggctgcttttgtggatttattttgattgggttgattttatacatctccttggccatcagaaaaagagtccaggagacaaagtttgggaatgcattcacagaggaggattctgaattagtggtgaattatatagcaaagaaatccttctgtcggcgagccattgaacttaccttacatagcttgggagtcagtgaggaactacaaaataaactagaagatgttgtgattgacaggaatcttctaattcttggaaaaattctgggtgaaggagagtttgggtctgtaatggaaggaaatcttaagcaggaagatgggacctctctgaaagtggcagtgaagaccatgaagttggacaactcttcacagcgggagatcgaggagtttctcagtgaggcagcgtgcatgaaagacttcagccacccaaatgtcattcgacttctaggtgtgtgtatagaaatgagctctcaaggcatcccaaagcccatggtaattttacccttcatgaaatacggggacctgcatacttacttactttattcccgattggagacaggaccaaagcatattcctctgcagacactattgaagttcatggtggatattgccctgggaatggagtatctgagcaacaggaattttcttcatcgagatttagctgctcgaaactgcatgttgcgagatgacatgactgtctgtgttgcggacttcggcctctctaagaagatttacagtggcgattattaccgccaaggccgcattgctaagatgcctgttaaatggatcgccatagaaagtcttgcagaccgagtctacacaagtaaaagtgatgtgtgggcatttggcgtgaccatgtgggaaatagctacgcggggaatgactccctatcctggggtccagaaccatgagatgtatgactatcttctccatggccacaggttgaagcagcccgaagactgcctggatgaactgtatgaaataatgtactcttgctggagaaccgatcccttagaccgccccaccttttcagtattgaggctgcagctagaaaaactcttagaaagtttgcctgacgttcggaaccaagcagacgttatttacgtcaatacacagttgctggagagctctgagggcctggcccagggctccacccttgctccactggacttgaacatcgaccctgactctataattgcctcctgcactccccgcgctgccatcagtgtggtcacagcagaagttcatgacagcaaacctcatgaaggacggtacatcctgaatgggggcagtgaggaatgggaagatctgacttctgccccctctgctgcagtcacagctgaaaagaacagtgttttaccgggggagagacttgttaggaatggggtctcctggtcccattcgagcatgctgcccttgggaagctcattgcccgatgaacttttgtttgctgacgactcctcagaaggctcagaagtcctgatgtgaggagaggtgcggggagacattccaaaaatcaagccaattcttctgctgtaggagaatccaattgtacctgatgtttttggtatttgtcttccttaccaagtgaactccatggccccaaagcaccagatgaatgttgttaagtaagctgtcattaaaaatacataatatatatttatttaaagagaaaaaatatgtgtatatcatggaaaaagacaaggatattttaataaaacattacttatttcatttcacttatcttgcatatcttaaaattaagcttcagctgctccttgatattaacatttgtacagagttgaagttgttttttcaagttcttttctttttcatgactattaaatgtaaaaatatttgtaaaatgaaatgccatatttgacttggcttctggtcttgatgtatttgataagaatgattcattcaatgtttaaagttgtataactgattaattttctgatatggcttcctaataaaatatgaataaggaagaaaaaa

SEQ ID NO: 14685 - DNA, 2224 bp, Homo sapiens
ggcgcgctgcattgtggggtggcggcggcggccgcgctagcgacgcggggccgggcggctgagcgttcgcggggccgaggccatggctttctgggcggggggttcgcccagcgtcgtggactatttccctagcgaggacttctaccgctgcggctactgcaagaacgagtcgggcagccgctccaatggcatgtgggcacattccatgacagtacaggattatcaggatctcatagaccgaggatggcgaagaagtggaaaatatgtgtacaaacctgtcatgaatcaaacatgttgtcctcagtacacaataaggtgccgacctttacaatttcagccttcaaaatctcacaagaaggttttgaaaaaaatgttgaaatttctggctaaaggggaggttcccaaaggaagttgtgaggatgagcccatggattccacaatggatgatgctgttgcgggtgactttgcattgataaataaactggatatacagtgtgatcttaaaacactcagtgatgacatcaaagagagtttagagagtgaaggaaaaaattcaaagaaagaagaacctcaggaattacttcagtcacaagatttcgtaggagagaagttgggctctggtgaaccgtcacattcagttaaagttcacacagttcctaagccaggcaaaggggctgatttgagtaagcctccatgtcgaaaagcaaaggaaatccggaaagaaaggaaaaggttaaaactaatgcagcagaacccagctggagaacttgagggtttccaggctcaaggtcacccaccatctttgtttccaccaaaggctaaatccaaccagccaaaatcactcgaagatttaatttttgagtctttaccagagaatgcatcacacaagttagaggtgaggttagtacctgtctcctttgaggacccagagttcaagtcgtctttcagccagtccttttctttgtatgtcaagtatcaagtggccatacaccaggatccacccgatgaatgtgggaagactgagttcacaagattcctttgcagttcacccttggaggcagagactccccctaatgggccagattgtggctatggctcctttcaccagcagtactggcttgacggaaagatcattgctgtgggggtgattgacatcctcccaaactgtgtatcatctgtgtatttgtactacgatcctgattattcgtttttgtctttgggcgtctactctgcactacgagaaattgcttttactaggcagcttcatgagaaaacttctcaactcagctattattatatgggtttctacattcattcatgtcccaagatgaaatataagggtcagtatagaccttctgatttgctgtgccctgagacatatgtttgggtacccattgagcaatgcctgccttcacttgaaaactccaagtactgccgtttcaaccaggacccagaagcagtggatgaggatcgcagtacggaacctgaccgattgcaggtgtttcacaagagagccatcatgccttacggtgtttataagaaacagcagaaagacccaagtgaggaggctgctgttctgcagtacgccagcctggtggggcagaagtgctccgagcggatgctgctgttcagaaactgacctgttcacctctgccgggaagttcctgtgttgtgctgatgatttgtgccaggatacatattcagtacctgtggggaaataactgtcaccacccacaaattagacattttttattttgactatctatggcttttaaaaaatattttgtggcaatgtatctgtgagaatctcatagttaatataaagattttaaaactgcattatgacctagcccccataattgggatttatcattttggaggattctttctagagcaagatatgctcaaattctcctgtttgtattttgtaaaatgaagaagtgaatctaagtaacttaatcacagttgtgcattttttttggttctgttagagaaattaaaacagactgtttcctcaggcccattttaaactgaacttatgctaggaaaccttaagtatggggaaggtagaaagttcatttcatcacttagaaaatatgtcttctcaagaacaaaactgtgctgttacaactcagtgttcaatgtgaaattgctgccaaatgttatgtagtttaatagagaacttgaaaaaataaaacattaaaatggaaaaaaaaaaaaaaaa

SEQ ID NO: 14686 - DNA, 7191 bp, Homo sapiens
gcgcgcgcgcgggcgggagcggagggcaacggggcggcgcgggcggccgggcgcagggtcgcgggaggtgacgcgcggcgaggatggcggcgcggggccgggggctgctgctgctgacgctgtcggtgctgttggcggcgggcccctccgccgctgcggccaagctcaacatccccaaagtgctgctgcccttcacgcgggccacgcgcgttaacttcacgctggaggcctcggagggctgctaccgctggttgtccacccggccggaggtggccagcatcgagccgctgggcctggacgagcagcagtgctcccagaaggcagtggtgcaggcccgcctgacccagcctgcccgcctcaccagcatcatcttcgcagaggacatcaccacaggccaggtcctgcgctgtgatgccattgtggacctcatccatgacatccagatcgtctccaccacccgcgagctctacctggaggactcccccctggagctgaagatccaggccctggactccgaagggaacaccttcagcactctggctggactggtcttcgagtggacgattgtgaaggactccgaggcggacaggttctcagactcccacaatgcgctgcgaatcctcactttcttggagtctacgtacatccctccttcttacatctcagagatggagaaggctgccaagcaaggggacaccatcctggtgtctgggatgaagaccgggagctccaagctcaaggctcgcatccaggaggctgtctacaagaatgtacgccctgcagaagtcaggctgctgattttggaaaacatccttctgaacccggcctatgacgtctacctgatggtgggaacctccattcactacaaggtgcagaagatcaggcaagggaaaattacagaactctccatgccttccgatcagtacgagttgcagcttcagaacagcatcccgggccccgaaggagacccagcccggccggtggctgtcttggcccaggacacgtcgatggtcactgcactgcagctgggacagagcagcctcgtccttggccacaggagtattcgcatgcaaggtgcttctaggttacccaacagcactatctacgtggtcgaacctggatacctagggttcactgttcaccctggtgacaggtgggtgctggagaccggccgcctgtatgaaatcaccatcgaagtttttgacaagttcagcaacaaggtctatgtatctgacaacatccgaattgaaactgtgcttcctgctgagttcttcgaggtgctctcgtcctcccagaatgggtcataccatcgcatcagggcactaaagaggggacagacggccattgacgcggccctcacctctgtggtggaccaggatggaggggtccacatactacaggtgcctgtgtggaaccagcaggaggtggaaattcacatcccgatcaccctgtatcccagcatcttgacatttccgtggcaaccaaagacgggcgcctatcagtacacaataagggcccacggtggcagtgggaacttcagctggtcttcgtcaagccacctggttgccacagttactgtcaagggcgtgatgaccacaggcagtgacatcgggttcagtgtgatccaggcacatgatgtgcagaacccactccatttcggtgagatgaaggtgtatgtgatcgagccccacagcatggagtttgccccgtgccaggtggaggcacgtgtgggccaggccctggagctgcccctgaggatcagtggcctcatgcccggcggggccagtgaggtggtcaccttgagcgactgctcccactttgacttggctgtcgaggtggagaaccagggtgtgttccagccactcccagggaggctgccgccaggctctgagcactgcagcggcatccgggtaaaggccgaggcccagggctctaccacgcttcttgtgagctacagacacggccacgtccacctgagtgccaagatcaccattgctgcctacctgcccctcaaggctgtggatccctcctctgttgccttggtaaccctgggctcctcaaaggagatgctgtttgaaggaggtcccagaccttggatcctcgagccgtccaaattcttccagaacgtcaccgctgaggacactgacagcatcggcctggctctctttgccccccattcctcccggaattatcagcaacactggatccttgtgacctgtcaggccttgggtgagcaggtcatcgccctgtcggtggggaacaagcccagcctcaccaacccctttcctgcggtggagcctgccgtggtgaagttcgtctgcgccccaccgtccaggctcaccctcgcgcctgtctacaccagcccccagctggacatgtcctgtccgctgctgcagcagaacaagcaggtggtcccagtgtccagccaccgcaacccccggctggacctggctgcttacgaccaggagggccgccggttcgacaacttcagctctctgagcatccagtgggagtccaccaggccagtgttggccagcatcgagcctgagctgcccatgcagctggtgtcccaggacgatgagagtggccaaaagaagctgcacggtttgcaggccattttggttcacgaggcatcaggaaccacagccatcactgccactgccactggctaccaggagtcccacctcagctctgccagaacaaagcagccgcatgaccctctggtgcctctgtcggcctccatagagctcatcctggtggaggacgtgagggtgagcccagaagaggtgaccatctacaaccaccctggcatccaggcagagctccgcatcagggaaggctcaggttacttcttcctcaacaccagcaccgcagatgttgtcaaggtggcctaccaggaggccaggggtgtcgccatggtgcaccctttgctcccgggctcatccaccatcatgatccatgacttgtgcctcgtcttcccggccccagccaaggctgtcgtttacgtgtcggacattcaggagctgtacatccgtgtggttgacaaggtggagattgggaagacagtgaaggcatacgtccgcgtgctggacttgcacaagaagcccttccttgccaaatacttcccctttatggacctgaagctccgagcagcctccccgatcattacattggtggcccttgatgaagcccttgacaactacaccatcacattcctcatccgcggtgtggccatcggccagaccagtctaactgcaagtgtgaccaataaagctggacagagaatcaactcagccccacaacagattgaagtctttcccccgttcaggctgatgcccaggaaggtgacactgcttatcggggccacgatgcaggtcacctccgagggcggcccccagcctcagtccaacatccttttctccatcagcaatgagagcgttgcgctggtgagcgctgctgggctggtacagggcctcgccatcgggaacggcactgtgtctgggctcgtgcaggcagtggatgcagagaccggcaaggtggtcatcatctctcaggacctcgtgcaggtggaggtgctgctgctaagggccgtgaggatccgcgcccccatcatgcggatgaggacgggcacccagatgcccatctatgtcaccggcatcaccaaccaccagaaccctttctcctttggcaatgccgtgccaggcctgaccttccactggtctgtcaccaagcgggacgtcctggacctccgagggcggcaccacgaggcgtcgatccgactcccgtcacagtacaactttgccatgaacgtgctcggccgggtaaaaggccggaccgggctgagggtggtggtcaaggctgtggaccccacatcggggcagctgtatggcctggccagagaactctcggatgagatccaagtccaggtgtttgagaagctgcagctgctcaaccctgaaatagaagcagaacaaatattaatgtcgcccaactcatatataaagctgcagacaaacagggatggtgcagcctctctgagctaccgcgtcctggatggacccgaaaaggttccagttgtgcatgttgatgagaaaggctttctagcatcagggtctatgatcgggacatccaccatcgaagtgattgcacaagagccctttggggccaaccaaaccatcattgttgctgtaaaggtatcccctgtttcctacctgagggtttccatgagccctgtcctgcacacccagaacaaggaggccctggtggccgtgcctttgggaatgaccgtgaccttcactgtccacttccacgacaactctggagatgtcttccatgctcacagttcggtcctcaactttgccactaacagagacgactttgtgcagatcgggaagggccccaccaacaacacctgcgttgtccgcacagtcagcgtgggcctgacactgctccgtgtgtgggacgcagagcacccgggcctctcggacttcatgcccctgcctgtcctacaggccatctccccagagctgtctggggccatggtggtgggggacgtgctctgtctggccactgttctgaccagcctggaaggcctctcaggaacctggagctcctcagccaacagcatcctccacatcgaccccaagacgggtgtggctgtggcccgggccgtgggatccgtgacggtttactatgaggtcgctgggcacctgaggacctacaaggaggtggtggtcagcgtccctcagaggatcatggcccgtcacctccaccccatccagaccagcttccaggaggctacagcctccaaagtgattgttgccgtgggagacagaagctctaacctgagaggcgagtgcacccccacccagagggaagtcatccaggccttgcacccagagaccctcatcagctgccagtcccagttcaagccggccgtctttgatttcccatctcaagatgtgttcaccgtggagccacagtttgacactgctctcggccagtacttctgctcaatcacaatgcacaggctgacggacaagcagcggaagcacctgagcatgaagaagacagctctggtggtcagtgcctccctctccagcagccacttctccacagagcaggtgggggccgaggtgcccttcagcccaggtctcttcgccgaccaggctgaaatccttttgagcaaccactacaccagttccgagatcagggtctttggtgccccggaggttctggagaacttggaggtgaaatccgggtccccggccgtgctggcattcgcaaaggagaagtcttttgggtggcccagcttcatcacatacacggtcggcgtcttggaccccgcggctggcagccaagggcctctgtccactaccctgaccttctccagccccgtgaccaaccaagccattgccatcccagtgacagtggcttttgtggtggatcgccgtgggcccggtccttatggagccagcctcttccagcacttcctggattcctaccaggtcatgttcttcacgctcttcgccctgttggctgggacagcggtcatgatcatagcctaccacactgtctgcacgccccgggatcttgctgtgcctgcagccctcacgcctcgagccagccctggacacagcccccactatttcgctgcctcatcacccacatctcccaatgcattgcctcctgctcgcaaagccagccctccctcagggctgtggagcccagcctatgcctcccactaggccgcgtgaaggttcccggaggatgggtctcagccgagcctcgtgcacccccaagatggaacatccctgctgcattcacactggaacaagcccctccagatgagtgccccggccccaggccagcttcactgccgtctcttcacacagagctgtagtttcggctctgcccattagctcattttatgtaggagttttaaatgtgtgtttttttcctttcaagtcttacaaagctaagactttttggctcattcctttttgcatggttgtctagggtttctggacaatgtgctgttgcatttttattttcctagccttgctaaaatctttcccttctcaagactttgagcagttagaagtgctctttagaagttgtctgtgggtgatgttactgtagtggtctcagggaaaggattgtccagttactttagggggtttttggtggggtttttccccctgtgaaaacttactttgcccctagtctggctgctgctaggacttctgaggagcaatgggacatgagtgtccctgtatctgcgccactgccgcaagggaagcctcaggaaccagcacctggaggccaggatagccaagccctgggtgagcgagaggctggagaacacaggagctcacccagggctgctgcccaaccatgggccactgtgaacagacttcagtcctctgtttttgtttcataagccgttgagacatctgatggacttggcttaggccctgctgggacatcccacgtgtgatccctttcactccatcaggacaccaggactgtccttaggaaaatgtccttgagatggcagcaggagtcatattttctgtgtgtgtgtttcggaaagccgctgtgtcctgcctcagcacaaagacccagtgtcatttgctcctcctgttcctgtgccactccagaacctcagcagatctgagccaccgcctgccagtgtgagaggcggccactttcatggcagctcatcaggcgcagggccccagacagcttcccagcaggccctagagcccggcctgggccaatgatggagggcggccgccagcccagggcctgcccatccagaagggactccccagggcctgggggaggagacccttggaaaagtcctctcttcccagctcctgattctggatctgagattctcagatcacaggcccctgtgctccaggccgaggctgggctaccctcagggagatccagagactcatgcccatggccatccatgcgtggacgctgtgtggagagtccaggatgacgggatcccgcacaagctcccttcagtccttcagggctgggccatgtggttgatttttctaaagctggagaaaggaagaattgtgccttgcatattacttgagcttaaactgacaacctggatgtaaataggagcctttctactggtttatttaataaagttctatgtgatttttt

SEQ ID NO: 14687 - DNA, 4231 bp, Homo sapiens
gcccagatcgtcgcctatcctgcttgcgcagccgctatcgcgtctgcccaccgacgaagcatgggtgtccagggcttccaagagttcctggagaagcgctgtcccggggccgtggtgcccgtggacctcctaaaactcgcgcgcacggtctcgcgccagcagcagcagcagcacttgcaccgccagctgccgccgactgcagccctagcgcccggggctccacgcgccgccaggggctccgtgcctctgcaaccgccgcttccgcccgctgccttgggtgcctactccgggggcgcggggccgactcggcaccatcaccccgctcaccacttccaccatcatggccaagcgcagcccgggctgcaccctccgctgccgccgccgccgccccctcagctgcccggggcccgggtgctggtggacgccggctcggcgctgccgcggctctatggcggctaccagacggattgggtgtgtggcggccaatggaacgccatgctgggctacttgtcagcgctgtgccaggcttgtgcctatcctggcggcgacggcctggagctcgtggtcatgttcccggggggcctgggcaaggaccggctggccgagtggggccgtcggtgccaggccgagcggcagacagcgcaactgatcgtgggacacgtgggcaacaagggcacccctccaccgcgggcctggttcctgccaccggcctgcctgagccactgcgtgaggctagcactcatccgcttccgggtcaaggtctttcagagccttgaagaccaccatttggaagtggtggcgtttttcagggaaaatggcttccatggccttcttgcccatgactccgagtatgctctctacaatattccctcttactacagttcccatgctctgaaactgagctggaatgggaagaacctcactaccaaccagttcctgatgcaagaagtagccaagcagctgggcctgaagaggatgaatttccccatatttgctgcactgctaggtaaccacatcctcccagatgaggacctggctgcttttcactggagcctcttgggaccagaacatcctcttgcatcacttaaggttcgagctcatcagctggttcttcctccctgtgacgtggtgatcaaggctgtttctgagtatgtcagttccatcaaagatccctcaaacctggatgtagttgggaaggatgttttcaaacagtctcagtccaggacagaagataaaatagagcgattcaagaaagcagttgagtattattcagtcacaaccaaactctcttcgctgccagtgggtccctcctttctaggttttcggaataataggcttggaaatcctccccttccacgaaatcaagtgggcaccatttctgctggaaagccaatgttttctcatcaagtgccccagaaagtgaaatatccaccaccattcccagtgggacccaactcatctcttctcttctcctcccatgctttgggggaatcccatgctttttctgaggatcccatgctgcagaacagcccctttgccaattgggctgtctcctatgactcttctgcatcccagtttcccaattacctgccttctaaagcctcacctcctttgggaccagactcttcccactcctcttcctctgatggtgatgagccaaatggagctagctctgatcatatcacagaagcatttcatcaccagcctgagtggggaaatcccaatcgtgacagagggtcctgggcacagcctgttgatactggagtttcagaagcgagcctaggtgatggtgagccccacatcccatctctgctgtctatgtctacaaggaaccacatggatatcaccattccacccttacctccagtagctccagaagtcttgagagttgctgaacacagacaccggaggggtcttatgtacccatatatctaccatgtcctcactaagggtgaaattaagatccccgtatgtattgaggatgagtgtaacatggagctgcctccagctgctctcttattccggtcagctcgtcaatatgtatatggagttctttttagtctggcagagacacagaggaaaatggaacgcttggccatgcgacggcggctgcctgtggaagttccttcagtgatccttaaagagtggtctgcctataaagggaagtcacctcaaacccctgagctggtgtctgcactgacatttcgggaatggacttgcccaaacctcaagaagctctggctaggcaaagcagttgaagacaagaacagaaggatgcgggccttcctggcctgtatgaagtcggacacgcccagtatgctcaatccagctaatgtccccacccatctgctgctcatgtgttgtgtactccggtacatggttcagtggcctggtggccgaatcctgcatcgccatgagctagacaccttccttgcacaggcagtgtctacccagctttatgaaccagatcgactccaagaactcaagattgagaaactggatgcccgagggatccagcttgctgccctcttcatgagtggagtcgacacagctctgtttgctaatgatgcctgtggccagccagtcccttgggagcattgctgtccatggatttactttgatggcaagctgttccagagcaagctaattaaagcaggccgagagcgagtatctctggttgagctctgtgatggccaggctgacctggcaaccaaagtggaaaagatgagacagagcatccttgaaggagtcaacatgaatcatccaccgccttctgctctacttccgtcacctacttttgtgcctcccatggtgccctctctctaccctgtttcactttattcccgagctatgggctccatgccacttccccctcaagggaggagccggggatttgcaggtctccatccaatcccaccccaaggaggaaaactggagattgctgggatggttgtgggccagtgggctggcagcagatcctccaggggccgaggatccttcggcatgcaagtggtttctgtcggtgggccaggaaaggggcatggaaaagaacagactggtagaggatccaagggacacaaaaaaggaaataagcaaggctcttcagatggagtttctaaatccctggagcttcatcaaggtcggtctcgctcccaggtaaatggaaacagtggcgcattgatcaaggaagagaagagtgatcatcgtcttccagctccatcacaatgtgccttatccagagacagcaatgagtgtaataatggtaaccgctacctccctatgaataatagggagaagaaccacttacaagagcaaaagctagaaactgtggcacaacggaaagaggactgataagctgaagatggcttcaccaaaccaggaagagggaaaaacttttacttttctgattttaggcccaagctagaggaggatataaatgcttaccctagatttctccaggattttggtgggatgtcctattgtgtccatcttttccccttccctgcctgtttctgggacttcagattcagtggtctgtttctggagaagttctggtcaaagatgaatggcagtaagactaggtcctagtctcaaattgaagatatagcaccaatagtttatttatctcctctgggagcctagtaaggcagtagctgtcagaaattgggtatcatcacataaggtcctatagaaaagctctagctttggtttttctgagcatttataatgatactcattatcaaagacttatatgataaacctatgaggttgtggggacagctgtggcctcctgaggtttttttttgtttttttttttctctatgaagtggtatctacctcttcttcactccttccaacttacctacccctggattttgtaccaccacctctagctttggcctgacaatcagataggtagatgttttcagaaaagtaaggtagtattggttattttaatttttattttttattttatacacttcaaaaaaactatcgatggcctttgtactgggggattcaagtgaatcagaaaagtactgggcagatttttcctgcctctcaaccagtgcattgtttgtaaaatagaagatgtggcacagttcattcactccctattgcccacaccatgaaagggtgggaatcagtgtaatgaacttgagtacgaaagggactcaagagactgtgtgtgtgtgtgtgtgtgtgtgtgtgtgtgtgtgtgtgtgtgtgaatg

SEQ ID NO: 14688 - DNA, 1552 bp, Homo sapiens
aactgtcgtacgtatgtcttctgtttcgtcctcgctttccggctgctgtttctccacggctctcctctttccccctcccttctctcccgggcggcttactttgcggcagcgccgagaaccccaccccctttctttgcggaatcaccatggcggctgggaccctgtacacgtatcctgaaaactggagggccttcaaggctctcatcgctgctcagtacagcggggctcaggtccgcgtgctctccgcaccaccccacttccattttggccaaaccaaccgcacccctgaatttctccgcaaatttcctgccggcaaggtcccagcatttgagggtgatgatggattctgtgtgtttgagagcaacgccattgcctactatgtgagcaatgaggagctgcggggaagtactccagaggcagcagcccaggtggtgcagtgggtgagctttgctgattccgatatagtgcccccagccagtacctgggtgttccccaccttgggcatcatgcaccacaacaaacaggccactgagaatgcaaaggaggaagtgaggcgaattctggggctgctggatgcttacttgaagacgaggacttttctggtgggcgaacgagtgacattggctgacatcacagttgtctgcaccctgttgtggctctataagcaggttctagagccttctttccgccaggcctttcccaataccaaccgctggttcctcacctgcattaaccagccccagttccgggctgtcttgggcgaagtgaaactgtgtgagaagatggcccagtttgatgctaaaaagtttgcagagacccaacctaaaaaggacacaccacggaaagagaagggttcacgggaagagaagcagaagccccaggctgagcggaaggaggagaaaaaggcggctgcccctgctcctgaggaggagatggatgaatgtgagcaggcgctggctgctgagcccaaggccaaggaccccttcgctcacctgcccaagagtacctttgtgttggatgaatttaagcgcaagtactccaatgaggacacactctctgtggcactgccatatttctgggagcactttgataaggacggctggtccctgtggtactcagagtatcgcttccctgaagaactcactcagaccttcatgagctgcaatctcatcactggaatgttccagcgactggacaagctgaggaagaatgccttcgccagtgtcatcctttttggaaccaacaatagcagctccatttctggagtctgggtcttccgaggccaggagcttgcctttccgctgagtccagattggcaggtggactacgagtcatacacatggcggaaactggatcctggcagcgaggagacccagacgctggttcgagagtacttttcctgggagggggccttccagcatgtgggcaaagccttcaatcagggcaagatcttcaagtgaacatctcttgccatcacctagctgcctgcacctgcccttcagggagatgggggtcattaaaggaaactgaacattgaaaaaaaaaaaaaaaa

SEQ ID NO: 14689 - DNA, 1047 bp, Homo sapiens
atggcctccttggaagtcagtcgtagtcctcgcaggtctcggcgggagctggaagtgcgcagtccacgacagaacaaatattcggtgcttttacctacctacaacgagcgcgagaacctgccgctcatcgtgtggctgctggtgaaaagcttctccgagagtggaatcaactatgaaattataatcatagatgatggaagcccagatggaacaagggatgttgctgaacagttggagaagatctatgggtcagacagaattcttctaagaccacgagagaaaaagttgggactaggaactgcatatattcatggaatgaaacatgccacaggaaactacatcattattatggatgctgatctctcacaccatccaaaatttattcctgaatttattaggaagcaaaaggagggtaattttgatattgtctctggaactcgctacaaaggaaatggaggtgtatatggctgggatttgaaaagaaaaataatcagccgtggggccaattttttaactcagatcttgctgagaccaggagcatctgatttaacaggaagtttcagattataccgaaaagaagttctagagaaattaatagaaaaatgtgtttctaaaggctacgtcttccagatggagatgattgttcgggcaagacagttgaattatactattggcgaggttccaatatcatttgtggatcgtgtttatggtgaatccaagttgggaggaaatgaaatagtatctttcttgaaaggattattgactctttttgctactacataaaagaaagatactcatttatagttacgttcatttcaggttaaacatgaaagaagcctggttactgatttgtataaaatgtactcttaaagtataaaatataaggtaaggtaaatttcatgcatctttttatgaagaccacctattttatatttcaaattaaataattttaaagttgctggcctaatgagcaatgttctcaattttcgttttcattttgctgtattgagacctataaataaatgtatatttttttttgcataaagt

SEQ ID NO: 14690 - DNA, 3325 bp, Homo sapiens
ggggtccttggctgggcggggcttgctcgcggtggcttgtggctccttcctgcggtgcttctctctttcgctcaggcccgtggcgccgacaggatgggcaagtgtcgtggacttcgtactgctaggaagctccgtagtcaccgacgagaccagaagtggcatgataaacagtataagaaagctcatttgggcacagccctaaaggccaacccttttggaggtgcttctcatgcaaaaggaatcgtgctggaaaaagtaggagttgaagccaaacagccaaattctgccattaggaagtgtgtaagggtccagctgatcaagaatggcaagaaaatcacagcctttgtacccaatgacggttgcttgaactttattgaggaaaatgatgaagttctggttgctggatttggtcgcaaaggtcatgctgttggtgatattcctggagtccgctttaaggttgtcaaagtagccaatgtttctcttttggccctatacaaaggcaagaaggaaagaccaagatcataaatattaatggtgaaaacactgtagtaataaattttcatatgccaaaaaatgtttgtatcttactgtcccctgttctcaccacgaagatcatgttcattaccaccaccacccccccttattttttttatcctaaaccagcaaacgcaggacctgtaccaattttaggagacaataagacagggttgtttcaggattctctagagttaataacatttgtaacctggcacagtttccctcatcctgtggaataagaaaatgggatagatctggaataaatgtgcagtattgtagtattactttaagaactttaagggaacttcaaaaactcactgaaattctagtgagatactttcttttttattcttggtattttccatatcgggtgcaacacttcagttaccaaatttcattgcacatagattatcttaggtacccttggaaatgcacattcttgtatccatcttacaggggcccaagatgataaatagtaaactcaaaattgctccccactctgtttattatttaaaggtgtcaggatctgtgttgtaatgtgtctacattaatgtgtttaggagaatacaggcattggatcatttagttgatggaagtatatgccaggcaagggagataaggtatacgacaagactgatgttttcagtatcttctcatgaggttgtcagagaccttcatgtcttcaaagactagtcagcaaatgaagtggtttagtgtagagacaagattggttgtgttttgataatttaagctaggtattgagtacatgtggattttgctgtccacaaatacttgtttcagagttttcatggatacagtggcatggttgaaatgaagctgtgagccttctgctttaaatctgatgtaagaaactcctgttaacaaatagtaagtatgggttaattagccctttgatcaaagcctagctttacattgtttaggatctttggaaaacaattggtttggttgcccactttccgtaggatcaagagcagaacctttcacatggcacagaagaacccaggttgcgcttcatacctgcatattccagccttagcctgccatttctctccttggcactttgtgctccagcaacactggtctcagttggtcatcctcaaacttgggttccatatccagcctcaggacctctgttcctgttactatggttccttgcatgtcgcctgctcttactaaagagctcgtgtgttttccagcacacttcggtttatctcttgatgatgatgctagtctctccctccgcaagggcggaaaggctgcctgttggtttgtaccagtgtttcctaacgtgtagctgcagtcagtatttggctaagctgttcccaggggctcaacagatgctttcggatgagccttaactgacccaatcctttgtgatgcgggagagattgctaggcctcgctcacctggccagaaccagggaaagaggccgcggttgcagcgcgattccaggccctgggcgtcaggcgcggggtgggcagctctccccgggcggtggggcccttgtgaccgcgaggcggggcgcaccaggaagggagtgggacagcgcgggcgcccagggatgtggcctggttacctgccttctctgatacgtcaagacaccttcaacaatggcttgcagctgtaccctgttggctgcacccaggacgcccttttcactgctaagcagtcctacctgaggcccaggggctgccagattgacccataaataatctccggcgcctcagatccagaagctgctgagcctgatcttagtgccttctcctttctctgtgtggccccccagcccctttccccactgccttgtgtccaaggccctttccttcatgtatccatggaggagagacaaaaatacacatcaataaaataagatagggaatccataaatagacattcagaagtatggccaacggatttatcttaaaaccaatggaggaagaagagtttcaataaatgttgtggacttccatttgtcaaagaccaaaacaaaggaaccccaaccttacatgtaatacaaacttaactcaaaatggatcatatatctaaatgtaaaatggaaagctataaaactgaaaacagactatctttacaacctaggcgtaggtatagtttttagacattacaccaaaagcacatgccgtaaaagaaaaaatagataaattggtggatttcattaaaattaaaaaactttttctctctgaaaaatcctgttaagctgggcgctgtggttcatgcctgtaatcccagcactttgggaggctgagttgggaagaaattaatagcttgaggccaggagttcaagatcatcctgggcagcaaagtcatacactcttgagggaagagagagaccttctcatattgttttatattgttttatactcagtacctgttttaagaaaaaaacaaggaagtgaaatcaaagacaggcagcccggcaccaggcctgaaaccagccctgggcctgcctggcctaaacctagtagttaaaaatcaacttacgacttagaacctgatgttatccgtagattccaagcattgtataaaaaaattgtgaaactccctgttgtgttctgtaccagtgcatgaaacccctgtcacatatcccctagattgctcaatcaatcacgaccctttcatgtgaaatctttagtgttgtgagcccttaaaagggacagaaattgtgcacttgaggagctcagattttaaggctgtagcttgccgatgctcccagctgaataaagcccttccttctacaaaaaaaaaaaaa

SEQ ID NO: 14691 - DNA, 2510 bp, Homo sapiens
gcacctcgctgctccagcctctggggcgcattccaaccttccagcctgcgacctgcggagaaaaaaaattacttattttcttgccccatacataccttgaggcgagcaaaaaaattaaattttaaccatgagggaaatcgtgcacatccaggctggtcagtgtggcaaccagatcggtgccaagttctgggaggtgatcagtgatgaacatggcatcgaccccaccggcacctaccacggggacagcgacctgcagctggaccgcatctctgtgtactacaatgaagccacaggtggcaaatatgttcctcgtgccatcctggtggatctagaacctgggaccatggactctgttcgctcaggtccttttggccagatctttagaccagacaactttgtatttggtcagtctggggcaggtaacaactgggccaaaggccactacacagagggcgccgagctggttgattctgtcctggatgtggtacggaaggaggcagagagctgtgactgcctgcagggcttccagctgacccactcactgggcgggggcacaggctctggaatgggcactctccttatcagcaagatccgagaagaataccctgatcgcatcatgaataccttcagtgtggtgccttcacccaaagtgtctgacaccgtggtcgagccctacaatgccaccctctccgtccatcagttggtagagaatactgatgagacctattgcattgacaacgaggccctctatgatatctgcttccgcactctgaagctgaccacaccaacctacggggatctgaaccaccttgtctcagccaccatgagtggtgtcaccacctgcctccgtttccctggccagctcaatgctgacctccgcaagttggcagtcaacatggtccccttcccacgtctccatttctttatgcctggctttgcccctctcaccagccgtggaagccagcagtatcgagctctcacagtgccggaactcacccagcaggtcttcgatgccaagaacatgatggctgcctgtgacccccgccacggccgatacctcaccgtggctgctgtcttccgtggtcggatgtccatgaaggaggtcgatgagcagatgcttaacgtgcagaacaagaacagcagctactttgtggaatggatccccaacaatgtcaagacagccgtctgtgacatcccacctcgtggcctcaagatggcagtcaccttcattggcaatagcacagccatccaggagctcttcaagcgcatctcggagcagttcactgccatgttccgccggaaggccttcctccactggtacacaggcgagggcatggacgagatggagttcaccgaggctgagagcaacatgaacgacctcgtctctgagtatcagcagtaccaggatgccaccgcagaagaggaggaggatttcggtgaggaggccgaagaggaggcctaaggcagagcccccatcacctcaggcttctcagttcccttagccgtcttactcaactgcccctttcctctccctcagaatttgtgtttgctgcctctatcttgttttttgttttttcttctggggggggtctagaacagtgcctggcacatagtaggcgctcaataaatacttgtttgttgaatgtctcctctctctttccactctgggaaacctaggtttctgccattctgggtgaccctgtatttctttctggtgcccattccatttgtccagttaatacttcctcttaaaaatctccaagaagctgggtctccagatcccatttagaaccaaccaggtgctgaaaacacatgtagataatggccatcatcctaagcccaaagtagaaaatggtagaaggtagtgggtagaagtcactatataaggaaggggatgggattttccattctaaaagttttggagagggaaatccaggctattaaagtcactaaatttctaagtatgtccatttcccatctcagcttcaagggaggtgtcagcagtattatctccactttcaatctccctccaagctctactctggaggagtctgtcccactctgtcaagtggaatccttccctttccaactctacctccctcactcagctcctttcccctgatcagagaaagggatcaagggggttgggaggggggaaagagaccagccttggtccctaagcctccagaaacgtcttcttaatccccaccttttcttactcccaaaaaagaatgaacacccctgactctggagtggtgtatactgccacatcagtgtttgagtcagtccccagaggagaggggaaccctcctccatcttttttgcaacatctcatttcttccttttgctgttgcttcccccctcacacacttggttttgttctatcctacatttgagatttctattttatgttgaacttgctgctttttttcatattgaaaagatgacatcgccccaagagccaaaaataaatgggaattgaaaaaaaaaaaaaaaaaaaaaaaaaaaaa

SEQ ID NO: 14692 - DNA, 1549 bp, Homo sapiens
tccgcggtcttctctctccacccccgacaccgcggggctccccccgcccgcccacggcgggccccggctgcccgatccccctcgcttcccgcgctctccagcggggccccagccccggccccctctctccctcccttctctctaattccccttccggacgctgccatcatgttgaagcctcagccgctacaacagccctcccagccccagcagccgccccccacgcaacaggccgtggcccgtcggccccccgggggcaccagccctcccaacggcggcctcccggggccgctggccacctctgcggctcctcccgggcctccagcggccgcctccccctgcctggggcctgtggccgctgccgggagcgggctccgccggggagccgaaggcatcttggcgccgcagccgccgccgccgcagcaacaccaggagaggccgggggcagccgccatcggcagcgccaggggacagagcacaggaaagggacccccacagtcacctgtgtttgaaggcgtctacaacaattccagaatgctgcatttccttacagctgttgtgggctccacttgtgatgtaaaggtgaaaaatggtaccacttatgagggtatcttcaagacgctaagctcaaagtttgaactagccgtggatgctgtgcaccggaaagcatctgagccagcaggtggccctcgtcgggaggacattgtggacaccatggtgtttaagccaagtgatgtcatgcttgttcacttccgaaatgttgacttcaactatgctactaaagacaagttcaccgattcagccattgccatgaactcgaaagtgaatggggaacacaaagagaaggtgcttcagcgctgggaggggggtgacagcaacagcgacgactatgacctcgagtctgacatgtccaatggatgggaccccaatgaaatgttcaagttcaatgaggagaactacggtgtgaagactacctatgatagcagtctttcttcttatacggtgcccttagaaaaggacaactcagaagagtttcgtcagcgagagctgcgtgcggcccagttggctcgagagattgaatcaagcccccagtaccgcctacggatcgccatggagaacgacgatgggcgcactgaagaggagaagcacagtgcagtccagcggcagggctcagggcgggagagccccagcttggcatccagggaggggaagtatatccctctgcctcacagagggcagggccagggtccagcaggggtggggggttcctgctctgcccctgcccgtccccacccagtcttgccctcccatcctctcatctattcccccgctggagacggaagatcttttattttctattatttataacttcagacttgggccccctgttctttctttcccattaacttgagtgacctgtgtgagagacagacagatgccccacgaggatggctggacaaggacttttactttttattacataaaaatattaaaaaataaataaaaaaaataaaattttaaactaacttaaaaaaaaaaaaaaaaaaaa

SEQ ID NO: 14693 - DNA, 2949 bp, Homo sapiens
atggacaagccaaggtcaggaataaggaataagaccattcctctgacagacaacacagtgattgagaagcacctggggaagtttggtgtcgtttgcttggaagacctcagtcatgaaattgccgtcccagggaagcatttccaggaggtctcatggttgttacgccctttctacctctcagtggcccgtcatgctaccaaaaatacagtgggcttcctcaaggagatgggcacacctggctatcagggtgaacgcatcacgcagagtctgggagcgcagagcgcgggggctgcggggtgggctgaaggtgggcagtaccggggggcggcgggcggagcggggccgggagggggcggtgccggagggccagcggtgtggcgcgccgcctgcagggggcgcttgcggcggctccggtcggagacaatcgcgctgagcgggcgccgcagcgggagcgggagccggagctgcgaggcgcggcgcagagctggggctgcgcggggccgggcgagcgggaccaggcgggagccatggaccgctagggcccggcctagccccgcgatgccgccggcgagtggccccagcgtcctcgcgcggctgttgccgctgctggggctgctgctcggcagcgcctcccgggctcccggcaagtcgccgccggagccccccagcccgcaggagatcctgatcaaggtgcaggtgtatgtgagcggggagctggtgcccctggcccgggcctcagtggatgtgtttgggaaccggactctgctggcagctggcaccacagactcagagggtgtggccaccctgcccctcagttatcgcttgggcacctgggtgctggtcactgctgcccgccctggcttcctcaccaactctgtgccctggcgtgttgacaagctgcccttgtatgcgtctgtcagcctctacctgctccctgagcggccggccacgctcatcctctatgaggacctggtgcacattctcctaggctctcccggtgcccgctcccagcccttggtgcagttccagcgccgggctgcccgcctgcctgtcagctccacctacagccagctctgggcgtcacttacgcctgccagcacccagcaggaaatgcgggctttccctgccttcctgggcactgaggcctccagctcaggcaatggctcctggctggagctgatgcccctgactgctgtgagcgtgcacctgctgacaggtaatgggacagaggtgccgctctcaggccccattcacctgtccctgcccgtgccctccgagactcgtgccctcaccgtgggcaccagcattccagcctggagatttgaccccaagagtgggctgtgggtgcgcaatggcactggtgtaatccggaaggaaggccggcagctctactggaccttcgtctccccccagctggggtactgggtggccgccatggcctcccccacggctggtaagagtagtggggcagacatcggcacctaccacaccatcttcttgctcaccatcctggcagccctggccctgctggtgcttatcctgctgtgtctgctcatctactactgccggaggcgctgcctgaagccgaggcaacagcaccgcaagctgcagctctcggggccctctgacggtaacaaacgagaccaggccacctcgatgtcccagctccacctcatctgtgggggacccctggaacccgccccgtcgggggaccccgaggctccgcctccaggccccctccactcggccttctccagctcccgggacttggcctcctcccgggatgacttcttccgcaccaagccgcgctctgccagccgcccggccgccgagccttcgggtgcccgcgggggcgagagcgccgggctcaagggcgctcgctcggccgagggccccggcgggctggagcccggcctagaggagcaccggcgggggccctcgggggctgcggccttcctgcacgagccgccctcgccgccgccgcccttcgaccactacctgggccacaagggggcggccgagggcaagacccccgacttcctgctgtcgcagtcggtggaccagctggcgcggccgccgtcgctgggccaggcggggcagctcatcttctgcggctccatcgaccacctcaaggacaacgtctaccgcaacgtcatgcccaccctggtgatccccgcgcactacgtgcgcctcggcggcgaggcgggcgccgccggcgtgggcgacgagccggccccgccggagggcacggcacccggcccggcgcgcgcttttccccagcccgacccccagcgcccgcagatgccgggccactcgggcccggggggcgagggcggcgggggcggcggcgagggctggggggccgggcgcgcggcgcccgtcagtggctcagtcaccatccctgtgctattcaacgagtccaccatggcgcagctcaacggggagctgcaggccctgaccgagaagaagctgctggaactgggcgtgaagccgcacccgcgcgcctggttcgtgtccctcgacgggcgctccaactcgcaagtgcgccactcttacatcgacctgcaggcgggcggcggggcacgcagcaccgacgccagcctggactcgggcgtagatgtccacgaggcgcggcccgcgcgccgccgcgaggacacggagcccagcagcagcgagagccgcacgggcctctgctctccggaggacaactcgctgacgccgctgctggacgaggtggcggcgcccgagggccgggcggccacggtaccccgggggcggggccgcagccgcggggacagctcccgcagcagcgccagcgagctgcggcgcgactcgctcaccagcccggaggacgagctgggggcggaggtgggcgacgaggcgggagacaagaagagcccgtggcagcggcgggaggagcggccgctgatggtgttcaacgtcaagtag

SEQ ID NO: 14694 - DNA, 3316 bp, Homo sapiens
gtaggggtaggagggggccggcggagtttccctccccgcccagcggccctgggcgggcttttcggctgcttctcataagcaggtggtttcgtttctccggcacaggtaggtttctctggcaccgattcggggcctgcccggacttcgccgcacgctgcagaacctcgcccagcgcccaccatgccccggcagctcagcgcggcggccgcgctcttcgcgtccctggccgtaattttgcacgatggcagtcaaatgagagcaaaagcatttccagaaaccagagattattctcaacctactgcagcagcaacagtacaggacataaaaaaacctgtccagcaaccagctaagcaagcacctcaccaaactttagcagcaagattcatggatggtcatatcacctttcaaacagcggccacagtaaaaattccaacaactaccccagcaactacaaaaaacactgcaaccaccagcccaattacctacaccctggtcacaacccaggccacacccaacaactcacacacagctcctccagttactgaagttacagtcggccctagcttagccccttattcactgccacccaccatcaccccaccagctcatacaactggaaccagttcatcaaccgtcagccacacaactgggaacaccactcaacccagtaaccagaccacccttccagcaactttatcgatagcactgcacaaaagcacaaccggtcagaagcctgttcaacccacccatgccccaggaacaacggcagctgcccacaataccacccgcacagctgcacctgcctccacggttcctgggcccacccttgcacctcagccatcgtcagtcaagactggaatttatcaggttctaaacggaagcagactctgtataaaagcagagatggggatacagctgattgttcaagacaaggagtcggttttttcacctcggagatacttcaacatcgaccccaacgcaacgcaagcctctgggaactgtggcacccgaaaatccaaccttctgttgaattttcagggcggatttgtgaatctcacatttaccaaggatgaagaatcatattatatcagtgaagtgggagcctatttgaccgtctcagatccagagacaatttaccaaggaatcaaacatgcggtggtgatgttccagacagcagtcgggcattccttcaagtgcgtgagtgaacagagcctccagttgtcagcccacctgcaggtgaaaacaaccgatgtccaacttcaagcctttgattttgaagatgaccactttggaaatgtggatgagtgctcgtctgactacacaattgtgcttcctgtgattggggccatcgtggttggtctctgccttatgggtatgggtgtctataaaatccgcctaaggtgtcaatcatctggataccagagaatctaattgttgcccggggggaatgaaaataatggaatttagagaactctttcatcccttccaggatggatgttgggaaattccctcagagtgtgggtccttcaaacaatgtaaaccaccatcttctattcaaatgaagtgagtcatgtgtgatttaagttcaggcagcacatcaatttctaaatactttttgtttattttatgaaagatatagtgagctgtttattttctagtttcctttagaatattttagccactcaaagtcaacatttgagatatgttgaattaacataatatatgtaaagtagaataagccttcaaattataaaccaagggtcaattgtaactaatactactgtgtgtgcattgaagattttattttacccttgatcttaacaaagcctttgctttgttatcaaatggactttcagtgcttttactatctgtgttttatggtttcatgtaacatacatattcctggtgtagcacttaactccttttccactttaaatttgtttttgttttttgagacggagtttcactcttgtcacccaggctggagtacagtggcacgatctcggcttatggcaacctccgcctcccgggttcaagtgattctcctgcttcagcttcccgagtagctgggattacaggcacacactaccacgcctggctaatttttgtatttttattatagacggggtttcaccatgttggccagactggtcttgaactcttgacctcaggtgatccacccacctcagcctcccaaagtgctgggattacaggcatgagccattgcgcccggccttaaatgttttttttaatcatcaaaaagaacaacatatctcaggttgtctaagtgtttttatgtaaaaccaacaaaaagaacaaatcagcttatattttttatcttgatgactcctgctccagaatcgctagactaagaattaggtggctacagatggtagaactaaacaataagcaagagacaataataatggcccttaattattaacaaagtgccagagtctaggctaagcactttatctatatctcatttcattctcacaacttataggtgaatgagtaaactgagacttaagggaactgaatcacttaaatgtcacctggctaactgatggcagagccagagcttgaattcatgttggtctgacatcaaggtctttggtcttctccctacaccaagttacctacaagaacaatgacaccacactctgcctgaaggctcacacctcataccagcatacgctcaccttacagggaaatgggtttatccaggatcatgagacattagggtagatgaaaggagagctttgcagataacaaaatagcctatccttaataaatcctccactctctggaaggagactgaggggctttgtaaaacattagtcagttgctcatttttatgggattgcttagctgggctgtaaagatgaaggcatcaaataaactcaaagtatttttaaatttttttgataatagagaaacttcgctaaccaactgttctttcttgagtgtatagccccatcttgtggtaacttgctgcttctgcacttcatatccatatttcctattgttcactttattctgtagagcagcctgccaagaattttatttctgctgttttttttgctgctaaagaaaggaactaagtcaggatgttaacagaaaagtccacataaccctagaattcttagtcaaggaataattcaagtcagcctagagaccatgttgactttcctcatgtgtttccttatgactcagtaagttggcaaggtcctgactttagtcttaataaaacattgaattgtagtaaaggtttttgtaataaaaacttactttggaaaaaaaaaaaaaaaaaaaa

SEQ ID NO: 14695 - DNA, 4122 bp, Homo sapiens
tttgtcatcagctcgctctccattggcggggagcggagagcagcgaagaagggggtggggaggggaggggaagggaagggggtggaaactgcctggagccgtttctccgcgccgctgttggtgctgccgctgcctcctcctcctccgccgccgccgccgccgccgccgcctcctccggctcttcgctcggcccctctccgcctccatgtgccggatagcgggagcgctgcggaccctgctgccgctgctggcggccctgcttcaggcgtctgtagaggcttctggtgaaatcgcattatgcaagactggatttcctgaagatgtttacagtgcagtcttatcgaaggatgtgcatgaaggacagcctcttctcaatgtgaagtttagcaactgcaatggaaaaagaaaagtacaatatgagagcagtgagcctgcagattttaaggtggatgaagatggcatggtgtatgccgtgagaagctttccactctcttctgagcatgccaagttcctgatatatgcccaagacaaagagacccaggaaaagtggcaagtggcagtaaaattgagcctgaagccaaccttaactgaggagtcagtgaaggagtcagcagaagttgaagaaatagtgttcccaagacaattcagtaagcacagtggccacctacaaaggcagaagagagactgggtcatccctccaatcaacttgccagaaaactccaggggaccttttcctcaagagcttgtcaggatcaggtctgatagagataaaaacctttcactgcggtacagtgtaactgggccaggagctgaccagcctccaactggtatcttcattatcaaccccatctcgggtcagctgtcggtgacaaagcccctggatcgcgagcagatagcccggtttcatttgagggcacatgcagtagatattaatggaaatcaagtggagaaccccattgacattgtcatcaatgttattgacatgaatgacaacagacctgagttcttacaccaggtttggaatgggacagttcctgagggatcaaagcctggaacatatgtgatgaccgtaacagcaattgatgctgacgatcccaatgccctcaatgggatgttgaggtacagaatcgtgtctcaggctccaagcaccccttcacccaacatgtttacaatcaacaatgagactggtgacatcatcacagtggcagctggacttgatcgagaaaaagtgcaacagtatacgttaataattcaagctacagacatggaaggcaatcccacatatggcctttcaaacacagccacggccgtcatcacagtgacagatgtcaatgacaatcctccagagtttactgccatgacgttttatggtgaagttcctgagaacagggtagacatcatagtagctaatctaactgtgaccgataaggatcaaccccatacaccagcctggaacgcagtgtacagaatcagtggcggagatcctactggacggttcgccatccagaccgacccaaacagcaacgacgggttagtcaccgtggtcaaaccaatcgactttgaaacaaataggatgtttgtccttactgttgctgcagaaaatcaagtgccattagccaagggaattcagcacccgcctcagtcaactgcaaccgtgtctgttacagttattgacgtaaatgaaaacccttattttgcccccaatcctaagatcattcgccaagaagaagggcttcatgccggtaccatgttgacaacattcactgctcaggacccagatcgatatatgcagcaaaatattagatacactaaattatctgatcctgccaattggctaaaaatagatcctgtgaatggacaaataactacaattgctgttttggaccgagaatcaccaaatgtgaaaaacaatatatataatgctactttccttgcttctgacaatggaattcctcctatgagtggaacaggaacgctgcagatctatttacttgatattaatgacaatgcccctcaagtgttacctcaagaggcagagacttgcgaaactccagaccccaattcaattaatattacagcacttgattatgacattgatccaaatgctggaccatttgcttttgatcttcctttatctccagtgactattaagagaaattggaccatcactcggcttaatggtgattttgctcagcttaatttaaagataaaatttcttgaagctggtatctatgaagttcccatcataatcacagattcgggtaatcctcccaaatcaaatatttccatcctgcgcgtgaaggtttgccagtgtgactccaacggggactgcacagatgtggacaggattgtgggtgcggggcttggcaccggtgccatcattgccatcctgctctgcatcatcatcctgcttatccttgtgctgatgtttgtggtatggatgaaacgccgggataaagaacgccaggccaaacaacttttaattgatccagaagatgatgtaagagataatattttaaaatatgatgaagaaggtggaggagaagaagaccaggactatgacttgagccagctgcagcagcctgacactgtggagcctgatgccatcaagcctgtgggaatccgacgaatggatgaaagacccatccacgctgagccccagtatccggtccgatctgcagccccacaccctggagacattggggacttcattaatgagggccttaaagcggctgacaatgaccccacagctccaccatatgactccctgttagtgtttgactatgaaggcagtggctccactgctgggtccttgagctcccttaattcctcaagtagtggtggtgagcaggactatgattacctgaacgactgggggccacggttcaagaaacttgctgacatgtatggtggaggtgatgactgaacttcagggtgaacttggtttttggacaagtacaaacaatttcaactgatattcccaaaaagcattcagaagctaggctttaactttgtagtctactagcacagtgcttgctggaggctttggcataggctgcaaaccaatttgggctcagagggaatatcagtgatccatactgtttggaaaaacactgagctcagttacacttgaattttacagtacagaagcactgggattttatgtgcctttttgtacctttttcagattggaattagttttctgtttaaggctttaatggtactgatttctgaaacgataagtaaaagacaaaatattttgtggtgggagcagtaagttaaaccatgatatgcttcaacacgcttttgttacattgcatttgcttttattaaaatacaaaattaaacaaacaaaaaaactcatggagcgattttattatcttgggggatgagaccatgagattggaaaatgtacattacttctagttttagactttagtttgttttttttttttcactaaaatcttaaaacttactcagctggttgcaaataaagggagttttcatatcaccaatttgtagcaaaattgaattttttcataaactagaatgttagacacattttggtcttaatccatgtacacttttttatttctgtatttttccacttcactgtaaaaatagtatgtgtacataatgttttattggcatagtctatggagaagtgcagaaacttcagaacatgtgtatgtattatttggactatggattcaggttttttgcatgtttatatctttcgttatggataaagtatttacaaaacagtgacatttgattcaattgttgagctgtagttagaatactcaatttttaatttttttaatttttttattttttattttctttttggtttggggagggagaaaagttcttagcacaaatgttttacataatttgtaccaaaaaaaaaaaaaaggaaaggaaagaaaggggtggcctgacactggtggcactactaagtgtgtgttttttaaaaaaaaaaatggaaaaaaaaaagcttttaaactggagagacttctgacaacagctttgcctctgtattgtgtaccagaatataaatgatacacctctgaccccagcgttctgaataaaatgctaattttggaaaaaaaaaaaaaaaaa

SEQ ID NO: 14696 - DNA, 3895 bp, Homo sapiens
ctaggcctgggactcctgggtccccggcagtgtctggaggcatggctggggctggcgggggcctcggggtctgggggaacctggtgctgctgggcctgtgcagctggacaggggccagggcgcctgcccccaacccagggaggaacctgacagtggagactcagaccaccagctccatctccctgagctgggaggtccccgatggcctagactcacagaactccaactactgggttcagtgtactggagacggcggcacaacagagactcgaaacacaacagccaccaacgtcaccgtggatggccttggacccgggtcattgtatacgtgttctgtgtgggtggagaaagacggagtaaatagctctgtggggactgtcactactgccacagctcccaacccagtgaggaacctgagagtggaggctcagaccaacagctccatcgccctgacctgggaggtccccgacggcccagacccacagaactccacctacggggttgagtacactggagatggtggcagagcagggactcgaagcacagcacacactaacatcaccgtggatggacttgaacccgggtgtttgtatgcgttttccatgtgggtgggaaagaatggaatcaacagctcccgggagactcgaaatgccaccacagctcacaacccagtgaggaacctgagagtggaggctcagaccaccagctccatctccctgagctgggaggtccccgatggcacagacccacagaactcgacctactgcgttcagtgcactggagatggtggcagaacagagactcgaaacacaacagacaccagagtcaccgtggatggccttggacccgggtcattgtatacgtgttctgtgtgggtggagaaagacggagtaaatagctctgtggagattgtcactagtgccacagctcccaacccagtgagaaacctgacagtggaggctcagaccaacagctccatcgccctgacctgggaggtccccgatggcccagacccacagaactccacctacggggttgagtacactggagatggtggcagagcagggactcgaagcacagcacacaccaacatcaccgtggatagacttgaacccgggtgtttgtatgtgttttccgtgtgggtggggaagaatggaatcaacagctcccgggagactcgaaatgccaccacagcccccaacccagtgagaaacctccatatggagactcagaccaacagctccatcgccctatgctgggaagtccccgatggcccataccctcaggactacacctactgggtagagtacactggagacggtggtggcacagagacccgaaacacaacaaataccagtgtgacagctgagagacttgagcccggaaccttgtacacattctctgtatgggcagaaaaaaatggagcacgtggctccaggcagaatgtcagcatctccacagtccccaacgcagtgacaagcctcagcaagcaggactggaccaacagcaccattgctttgcgctggacagctccccagggcccaggccagtcttcctacagctactgggtctcatgggtcagggaaggcatgactgaccccaggacccaaagcacctcaggtactgacatcaccctaaaggaactggaagctggcagcctgtaccacctcaccgtctgggccgagaggaatgaggtcagaggctataacagcaccctcactgcagccactgctcccaatgaggtcacagatctccagaatgaaactcagactaagaactcagtcatgctgtggtggaaggcccctggagacccccactctcagttgtacgtatactgggtccagtgggccagcaagggacatccccggagggggcaagatccccaagcgaattgggtcaaccagaccagcaggaccaatgagacgtggtacaaagtggaggccctggaacccgggacgttgtacaatttcaccgtgtgggcagagaggaatgacgtagccagttccacgcagagcctctgtgcgtccacatacccagacacagtcaccatcacttcctgtgtcagcacctcagcgggctatggagtcaacttgatctggtcctgcccccagggaggctacgaggcctttgagttggaggtgggaggacagcggggctcccaggacagatcttcatgtggggaggctgtgtctgtgttgggtctcgggccggctcggtcctacccagccaccatcacgaccatctgggacggaatgaaggtcgtgtctcactctgtggtctgccacaccgagagtgcaggggtcattgccggagcctttgtgggcatcctcctgtttctcatcctcgtgggcctgctgattttcttcctgaagaggaggaataagaagaagcagcagaaaccagaactcagggatctggtctttagctccccaggggacatcccagctgaagacttcgctgaccacgtcaggaagaatgagagggacagcaactgtggttttgcagacgagtaccagcaactctccctggtgggccacagccagtctcagatggtggcttcggcttcagagaacaacgccaagaaccgctacagaaatgtgctgccctatgactggtcccgggtgcccctgaagcccatccatgaggagccaggctctgactacatcaatgccagcttcatgcccggtctctggagcccccaggagttcattgcaacccagggtcccctgccacagacagtgggtgacttctggcgcctggtgtgggaacagcagagccacaccctggtcatgctgaccaactgcatggaggccggccgggtgaagtgtgagcattactggcctctggactcgcagccctgcacccatgggcacctgcgggtaaccctggtaggtgaggaagtgatggagaactggacggtgcgggaactgctgctcctccaggtggaggagcagaagacactgtctgtgcgccaattccactaccaggcctggccggatcacggcgttccctcctccccagacaccttgctggctttctggaggatgcttcggcagtggctggatcagaccatggagggaggcccacccattgtgcactgcagtgctggcgtgggtcgcacaggaaccctcattgccctggacgtcctgctccggcagctgcagtccgagggtctccttgggcccttcagctttgtaaggaagatgagagagagtcggccgttgatggtgcagactgaggctcagtacgtattcctgcatcagtgcatcctgcggttcctccaacagtcagcccaggccccagccgagaaggaagtcccgtatgaggatgtcgaaaacctcatctacgagaacgtggccgccatccaggcccacaagttggaggtctaagtgacgagggggctgggtcggcagcccaggcatcctcaagctctggacacccacttgagcccagattcctggaagagcagagggctgggctcccagactcctgggtgctgtgggaggagggggctggtatcccaaactctggtttccccaggagagagtggtctggtgggcttcagatgagtcctatgggagctggggatctggattcctggttccctgaaggaggagagggatgatagcttggattccctaggtctttccaggatgcagaaagaaacaggctggggcctggattctgaggcaggaaggaatttgggtctggagttctggctacttgaggaccaaaggcaggaaggatcctgccttgattttacttcagaaaccaaatcagtcttctataatctggggtcggagggagtccctgtgcccaaggtctctctgcaccccaccatccacatgtatttttccttctatcccataatttattaaatcactgttctccccag

SEQ ID NO: 14697 - DNA, 1935 bp, Homo sapiens
atctccgctggttcccggaagccgccgcggacaagctctcccgggcgcgggcgggggtcgtgtgcttggaggaagccgcggaacccccagcgtccgtccatggcgtggagccttgggagctggctgggtggctgcctgctggtgtcagcattgggaatggtaccacctcccgaaaatgtcagaatgaattctgttaatttcaagaacattctacagtgggagtcacctgcttttgccaaagggaacctgactttcacagctcagtacctaagttataggatattccaagataaatgcatgaatactaccttgacggaatgtgatttctcaagtctttccaagtatggtgaccacaccttgagagtcagggctgaatttgcagatgagcattcagactgggtaaacatcaccttctgtcctgtggatgacaccattattggaccccctggaatgcaagtagaagtacttgctgattctttacatatgcgtttcttagcccctaaaattgagaatgaatacgaaacttggactatgaagaatgtgtataactcatggacttataatgtgcaatactggaaaaacggtactgatgaaaagtttcaaattactccccagtatgactttgaggtcctcagaaacctggagccatggacaacttattgtgttcaagttcgagggtttcttcctgatcggaacaaagctggggaatggagtgagcctgtctgtgagcaaacaacccatgacgaaacggtcccctcctggatggtggccgtcatcctcatggcctcggtcttcatggtctgcctggcactcctcggctgcttcgccttgctgtggtgcgtttacaagaagacaaagtacgccttctcccctaggaattctcttccacagcacctgaaagagtttttgggccatcctcatcataacacacttctgtttttctcctttccattgtcggatgagaatgatgtttttgacaagctaagtgtcattgcagaagactctgagagcggcaagcagaatcctggtgacagctgcagcctcgggaccccgcctgggcaggggccccaaagctaggctctgagaaggaaacacactcggctgggcacagtgacgtactccatctcacatctgcctcagtgagggatcagggcagcaaacaagggccaagaccatctgagccagccccacatctagaactcccagaccctggacttagccaccagagagctacattttaaaggctgtcttggcaaaaatactccatttgggaactcactgccttataaaggctttcatgatgttttcagaagttggccactgagagtgtaattttcagccttttatatcactaaaataagatcatgttttaattgtgagaaacagggccgagcacagtggctcacgcctgtaataccagcaccttagaggtcgaggcaggcggatcacttgaggtcaggagttcaagaccagcctggccaatatggtgaaacccagtctctactaaaaatacaaaaattagctaggcatgatggcgcatgcctataatcccagctactcgagtgcctgaggcaggagaattgcatgaacccgggaggaggaggaggaggttgcagtgagccgagatagcggcactgcactccagcctgggtgacaaagtgagactccatctcaaaaaaaaaaaaaaaaaaaattgtgagaaacagaaatacttaaaatgaggaataagaatggagatgttacatctggtagatgtaacattctaccagattatggatggactgatctgaaaatcgacctcaactcaagggtggtcagctcaatgctacacagagcacggacttttggattctttgcagtactttgaatttatttttctacctatatatgttttatatgctgctggtgctccattaaagttttactctgtgttgc

SEQ ID NO: 14698 - DNA, 2010 bp, Homo sapiens
ggcagcgactgcgccccgtcccggcgccgcgctcgtccgcagaggaggcggcccggcccgggcagctgcggctcgggatccgtcgaggggaggccgagcttgccaagctggcgcccagcggggtcatggtgcccggcgcccgcggcggcggcgcactggcgcgggctgccgggcggggcctcctggctttgctgctcgcggtctccgccccgctccggctgcaggcggaggagctgggtgatggctgtggacacctagtgacttatcaggatagtggcacaatgacatctaagaattatcccgggacctaccccaatcacactgtttgcgaaaagacaattacagtaccaaaggggaaaagactgattctgaggttgggagatttggatatcgaatcccagacctgtgcttctgactatcttctcttcaccagctcttcagatcaatatggtccatactgtggaagtatgactgttcccaaagaactcttgttgaacacaagtgaagtaaccgtccgctttgagagtggatcccacatttctggccggggttttttgctgacctatgcgagcagcgaccatccagatttaataacatgtttggaacgagctagccattatttgaagacagaatacagcaaattctgcccagctggttgtagagacgtagcaggagacatttctgggaatatggtagatggatatagagatacctctttattgtgcaaagctgccatccatgcaggaataattgctgatgaactaggtggccagatcagtgtgcttcagcgcaaagggatcagtcgatatgaagggattctggccaatggtgttctttcgagggatggttccctgtcagacaagcgatttctgtttacctccaatggttgcagcagatccttgagttttgaacctgacgggcaaatcagagcttcttcctcatggcagtcggtcaatgagagtggagaccaagttcactggtctcctggccaagcccgacttcaggaccaaggcccatcatgggcttcgggcgacagtagcaacaaccacaaaccacgagagtggctggagatcgatttgggggagaaaaagaaaataacaggaattaggaccacaggatctacacagtcgaacttcaacttttatgttaagagttttgtgatgaacttcaaaaacaataattctaagtggaagacctataaaggaattgtgaataatgaagaaaaggtgtttcagggtaactctaactttcgggacccagtgcaaaacaatttcatccctcccatcgtggccagatatgtgcgggttgtcccccagacatggcaccagaggatagccttgaaggtggagctcattggttgccagattacacaaggtaatgattcattggtgtggcgcaagacaagtcaaagcaccagtgtttcaactaagaaagaagatgagacaatcacaaggcccatcccctcggaagaaacatccacaggaataaacattacaacggtggctattccattggtgctccttgttgtcctggtgtttgctggaatggggatctttgcagcctttagaaagaagaagaagaaaggaagtccgtatggatcagcagaggctcagaaaacagactgttggaagcagattaaatatccctttgccagacatcagtcagctgagtttaccatcagctatgataatgagaaggagatgacacaaaagttagatctcatcacaagtgatatggcaggttaactccgttgactgccaaaatagcatccccaacgtgcagccctccgcatctatcagcaggttgccccggatggatctcagagatgaggatcggaacaccatgttctttcccaccctaacaacaacaaagggcagtaaattaaagtactctttgtaaggtacagttaccgattaatctagagataaaatattttcttaaaaatatatttcattaaacacctatgctgtctctataaaaaaaaaaaaaaaaaaaaaaaaaaaaaaaaaa

SEQ ID NO: 14699 - DNA, 5582 bp, Homo sapiens
ccaggcggcgttgcggccccggccccggctccctgcgccgccgccgccgccgccgccgccgccgccgccgccgccgccagcgctagcgccagcagccgggcccgatcacccgccgcccggtgcccgccgccgcccgcgccagcaaccgggcccgatcacccgccgcccggtgcccgccgccgcccgcgccaccggcatggcgctccggggcttctgcagcgccgatggctccgacccgctctgggactggaatgtcacgtggaataccagcaaccccgacttcaccaagtgctttcagaacacggtcctcgtgtgggtgccttgtttttacctctgggcctgtttccccttctacttcctctatctctcccgacatgaccgaggctacattcagatgacacctctcaacaaaaccaaaactgccttgggatttttgctgtggatcgtctgctgggcagacctcttctactctttctgggaaagaagtcggggcatattcctggccccagtgtttctggtcagcccaactctcttgggcatcaccacgctgcttgctacctttttaattcagctggagaggaggaagggagttcagtcttcagggatcatgctcactttctggctggtagccctagtgtgtgccctagccatcctgagatccaaaattatgacagccttaaaagaggatgcccaggtggacctgtttcgtgacatcactttctacgtctacttttccctcttactcattcagctcgtcttgtcctgtttctcagatcgctcacccctgttctcggaaaccatccacgaccctaatccctgcccagagtccagcgcttccttcctgtcgaggatcaccttctggtggatcacagggttgattgtccggggctaccgccagcccctggagggcagtgacctctggtccttaaacaaggaggacacgtcggaacaagtcgtgcctgttttggtaaagaactggaagaaggaatgcgccaagactaggaagcagccggtgaaggttgtgtactcctccaaggatcctgcccagccgaaagagagttccaaggtggatgcgaatgaggaggtggaggctttgatcgtcaagtccccacagaaggagtggaacccctctctgtttaaggtgttatacaagacctttgggccctacttcctcatgagcttcttcttcaaggccatccacgacctgatgatgttttccgggccgcagatcttaaagttgctcatcaagttcgtgaatgacacgaaggccccagactggcagggctacttctacaccgtgctgctgtttgtcactgcctgcctgcagaccctcgtgctgcaccagtacttccacatctgcttcgtcagtggcatgaggatcaagaccgctgtcattggggctgtctatcggaaggccctggtgatcaccaattcagccagaaaatcctccacggtcggggagattgtcaacctcatgtctgtggacgctcagaggttcatggacttggccacgtacattaacatgatctggtcagcccccctgcaagtcatccttgctctctacctcctgtggctgaatctgggcccttccgtcctggctggagtggcggtgatggtcctcatggtgcccgtcaatgctgtgatggcgatgaagaccaagacgtatcaggtggcccacatgaagagcaaagacaatcggatcaagctgatgaacgaaattctcaatgggatcaaagtgctaaagctttatgcctgggagctggcattcaaggacaaggtgctggccatcaggcaggaggagctgaaggtgctgaagaagtctgcctacctgtcagccgtgggcaccttcacctgggtctgcacgccctttctggtggccttgtgcacatttgccgtctacgtgaccattgacgagaacaacatcctggatgcccagacagccttcgtgtctttggccttgttcaacatcctccggtttcccctgaacattctccccatggtcatcagcagcatcgtgcaggcgagtgtctccctcaaacgcctgaggatctttctctcccatgaggagctggaacctgacagcatcgagcgacggcctgtcaaagacggcgggggcacgaacagcatcaccgtgaggaatgccacattcacctgggccaggagcgaccctcccacactgaatggcatcaccttctccatccccgaaggtgctttggtggccgtggtgggccaggtgggctgcggaaagtcgtccctgctctcagccctcttggctgagatggacaaagtggaggggcacgtggctatcaagacgcggatcttggtcacgcacagcatgagctacttgccgcaggtggacgtcatcatcgtcatgagtggcggcaagatctctgagatgggctcctaccaggagctgctggctcgagacggcgccttcgctgagttcctgcgtacctatgccagcacagagcaggagcaggatgcagaggagaacggggtcacgggcgtcagcggtccagggaaggaagcaaagcaaatggagaatggcatgctggtgacggacagtgcagggaagcaactgcagagacagctcagcagctcctcctcctatagtggggacatcagcaggcaccacaacagcaccgcagaactgcagaaagctgaggccaagaaggaggagacctggaagctgatggaggctgacaaggcgcagacagggcaggtcaagctttccgtgtactgggactacatgaaggccatcggactcttcatctccttcctcagcatcttccttttcatgtgtaaccatgtgtccgcgctggcttccaactattggctcagcctctggactgatgaccccatcgtcaacgggactcaggagcacacgaaagtccggctgagcgtctatggagccctgggcatttcacaagggatcgccgtgtttggctactccatggccgtgtccatcggggggatcttggcttcccgctgtctgcacgtggacctgctgcacagcatcctgcggtcacccatgagcttctttgagcggacccccagtgggaacctggtgaaccgcttctccaaggagctggacacagtggactccatgatcccggaggtcatcaagatgttcatgggctccctgttcaacgtcattggtgcctgcatcgttatcctgctggccacgcccatcgccgccatcatcatcccgccccttggcctcatctacttcttcgtccagaggttctacgtggcttcctcccggcagctgaagcgcctcgagtcggtcagccgctccccggtctattcccatttcaacgagaccttgctgggggtcagcgtcattcgagccttcgaggagcaggagcgcttcatccaccagagtgacctgaaggtggacgagaaccagaaggcctattaccccagcatcgtggccaacaggtggctggccgtgcggctggagtgtgtgggcaactgcatcgttctgtttgctgccctgtttgcggtgatctccaggcacagcctcagtgctggcttggtgggcctctcagtgtcttactcattgcaggtcaccacgtacttgaactggctggttcggatgtcatctgaaatggaaaccaacatcgtggccgtggagaggctcaaggagtattcagagactgagaaggaggcgccctggcaaatccaggagacagctccgcccagcagctggccccaggtgggccgagtggaattccggaactactgcctgcgctaccgagaggacctggacttcgttctcaggcacatcaatgtcacgatcaatgggggagaaaaggtcggcatcgtggggcggacgggagctgggaagtcgtccctgaccctgggcttatttcggatcaacgagtctgccgaaggagagatcatcatcgatggcatcaacatcgccaagatcggcctgcacgacctccgcttcaagatcaccatcatcccccaggaccctgttttgttttcgggttccctccgaatgaacctggacccattcagccagtactcggatgaagaagtctggacgtccctggagctggcccacctgaaggacttcgtgtcagcccttcctgacaagctagaccatgaatgtgcagaaggcggggagaacctcagtgtcgggcagcgccagcttgtgtgcctagcccgggccctgctgaggaagacgaagatccttgtgttggatgaggccacggcagccgtggacctggaaacggacgacctcatccagtccaccatccggacacagttcgaggactgcaccgtcctcaccatcgcccaccggctcaacaccatcatggactacacaagggtgatcgtcttggacaaaggagaaatccaggagtacggcgccccatcggacctcctgcagcagagaggtcttttctacagcatggccaaagacgccggcttggtgtgagccccagagctggcatatctggtcagaactgcagggcctatatgccagcgcccagggaggagtcagtacccctggtaaaccaagcctcccacactgaaaccaaaacataaaaaccaaacccagacaaccaaaacatattcaaagcagcagccaccgccatccggtcccctgcctggaactggctgtgaagacccaggagagacagagatgcgaaccacccaaaacacgcacaccctgcccctggtgccctgagacagacacacagcctcacgcccccaggaatgcaagtggtttcctggtgcttcccacggaggagttttggcagccagacttctggaggaattggttgtatagaagatcctagtgaccaaattcagcctactgcctcggatctctccagccgaagtctgtggactgcaagtctttgagatgcttctggctcccatcacctctaacatccttgtctgggtctaccaggaacgcttcatttccttggggctgcagttttgtggttgaggggcctggagaaaatcattttctccccttggcagtgtcccagggccctggatggtcctcttaccaacatctggtcttccaggcactcaaaagctgggaaccagcatctcagcgccagctctaccagttctcgttttgggccagaggcagcctctgcactcccacgcctgtcctcctggaagggacctggttggactaacggctaacctggacctggaactgtagggccaggggattgtctcagggccgacgttccacctggggcttccctccccacccaccccgactccaggctttcccttttttcttttgttcaacattgtaagaacaatcaatgctgttattactgatcccaccatgattgatgtggggtaaatattaaggagatggcctcatgggaatttgaccttgactagaaatagagactgagagtgagcaaccagctggaaggtactatgccagtcctagcagaaaaatgtgttaggggcctggcccaaagcagtgttggttgcttacagtgttgattgattttgttcttttttcttaccacctcttttctttccctctcatggtacctgctcatggttatgaagctttcaaagtaaagaacacgaaatac

SEQ ID NO: 14700 - DNA, 5927 bp, Homo sapiens
ccaggcggcgttgcggccccggccccggctccctgcgccgccgccgccgccgccgccgccgccgccgccgccgccgccagcgctagcgccagcagccgggcccgatcacccgccgcccggtgcccgccgccgcccgcgccagcaaccgggcccgatcacccgccgcccggtgcccgccgccgcccgcgccaccggcatggcgctccggggcttctgcagcgccgatggctccgacccgctctgggactggaatgtcacgtggaataccagcaaccccgacttcaccaagtgctttcagaacacggtcctcgtgtgggtgccttgtttttacctctgggcctgtttccccttctacttcctctatctctcccgacatgaccgaggctacattcagatgacacctctcaacaaaaccaaaactgccttgggatttttgctgtggatcgtctgctgggcagacctcttctactctttctgggaaagaagtcggggcatattcctggccccagtgtttctggtcagcccaactctcttgggcatcaccacgctgcttgctacctttttaattcagctggagaggaggaagggagttcagtcttcagggatcatgctcactttctggctggtagccctagtgtgtgccctagccatcctgagatccaaaattatgacagccttaaaagaggatgcccaggtggacctgtttcgtgacatcactttctacgtctacttttccctcttactcattcagctcgtcttgtcctgtttctcagatcgctcacccctgttctcggaaaccatccacgaccctaatccctgcccagagtccagcgcttccttcctgtcgaggatcaccttctggtggatcacagggttgattgtccggggctaccgccagcccctggagggcagtgacctctggtccttaaacaaggaggacacgtcggaacaagtcgtgcctgttttggtaaagaactggaagaaggaatgcgccaagactaggaagcagccggtgaaggttgtgtactcctccaaggatcctgcccagccgaaagagagttccaaggtggatgcgaatgaggaggtggaggctttgatcgtcaagtccccacagaaggagtggaacccctctctgtttaaggtgttatacaagacctttgggccctacttcctcatgagcttcttcttcaaggccatccacgacctgatgatgttttccgggccgcagatcttaaagttgctcatcaagttcgtgaatgacacgaaggccccagactggcagggctacttctacaccgtgctgctgtttgtcactgcctgcctgcagaccctcgtgctgcaccagtacttccacatctgcttcgtcagtggcatgaggatcaagaccgctgtcattggggctgtctatcggaaggccctggtgatcaccaattcagccagaaaatcctccacggtcggggagattgtcaacctcatgtctgtggacgctcagaggttcatggacttggccacgtacattaacatgatctggtcagcccccctgcaagtcatccttgctctctacctcctgtggctgaatctgggcccttccgtcctggctggagtggcggtgatggtcctcatggtgcccgtcaatgctgtgatggcgatgaagaccaagacgtatcaggtggcccacatgaagagcaaagacaatcggatcaagctgatgaacgaaattctcaatgggatcaaagtgctaaagctttatgcctgggagctggcattcaaggacaaggtgctggccatcaggcaggaggagctgaaggtgctgaagaagtctgcctacctgtcagccgtgggcaccttcacctgggtctgcacgccctttctggtggccttgtgcacatttgccgtctacgtgaccattgacgagaacaacatcctggatgcccagacagccttcgtgtctttggccttgttcaacatcctccggtttcccctgaacattctccccatggtcatcagcagcatcgtgcaggcgagtgtctccctcaaacgcctgaggatctttctctcccatgaggagctggaacctgacagcatcgagcgacggcctgtcaaagacggcgggggcacgaacagcatcaccgtgaggaatgccacattcacctgggccaggagcgaccctcccacactgaatggcatcaccttctccatccccgaaggtgctttggtggccgtggtgggccaggtgggctgcggaaagtcgtccctgctctcagccctcttggctgagatggacaaagtggaggggcacgtggctatcaagggctccgtggcctatgtgccacagcaggcctggattcagaatgattctctccgagaaaacatcctttttggatgtcagctggaggaaccatattacaggtccgtgatacaggcctgtgccctcctcccagacctggaaatcctgcccagtggggatcggacagagattggcgagaagggcgtgaacctgtctgggggccagaagcagcgcgtgagcctggcccgggccgtgtactccaacgctgacatttacctcttcgatgatcccctctcagcagtggatgcccatgtgggaaaacacatctttgaaaatgtgattggccccaaggggatgctgaagaacaagacgcggatcttggtcacgcacagcatgagctacttgccgcaggtggacgtcatcatcgtcatgagtggcggcaagatctctgagatgggctcctaccaggagctgctggctcgagacggcgccttcgctgagttcctgcgtacctatgccagcacagagcaggagcaggatgcagaggagaacggggtcacgggcgtcagcggtccagggaaggaagcaaagcaaatggagaatggcatgctggtgacggacagtgcagggaagcaactgcagagacagctcagcagctcctcctcctatagtggggacatcagcaggcaccacaacagcaccgcagaactgcagaaagctgaggccaagaaggaggagacctggaagctgatggaggctgacaaggcgcagacagggcaggtcaagctttccgtgtactgggactacatgaaggccatcggactcttcatctccttcctcagcatcttccttttcatgtgtaaccatgtgtccgcgctggcttccaactattggctcagcctctggactgatgaccccatcgtcaacgggactcaggagcacacgaaagtccggctgagcgtctatggagccctgggcatttcacaagggatcgccgtgtttggctactccatggccgtgtccatcggggggatcttggcttcccgctgtctgcacgtggacctgctgcacagcatcctgcggtcacccatgagcttctttgagcggacccccagtgggaacctggtgaaccgcttctccaaggagctggacacagtggactccatgatcccggaggtcatcaagatgttcatgggctccctgttcaacgtcattggtgcctgcatcgttatcctgctggccacgcccatcgccgccatcatcatcccgccccttggcctcatctacttcttcgtccagaggttctacgtggcttcctcccggcagctgaagcgcctcgagtcggtcagccgctccccggtctattcccatttcaacgagaccttgctgggggtcagcgtcattcgagccttcgaggagcaggagcgcttcatccaccagagtgacctgaaggtggacgagaaccagaaggcctattaccccagcatcgtggccaacaggtggctggccgtgcggctggagtgtgtgggcaactgcatcgttctgtttgctgccctgtttgcggtgatctccaggcacagcctcagtgctggcttggtgggcctctcagtgtcttactcattgcaggtcaccacgtacttgaactggctggttcggatgtcatctgaaatggaaaccaacatcgtggccgtggagaggctcaaggagtattcagagactgagaaggaggcgccctggcaaatccaggagacagctccgcccagcagctggccccaggtgggccgagtggaattccggaactactgcctgcgctaccgagaggacctggacttcgttctcaggcacatcaatgtcacgatcaatgggggagaaaaggtcggcatcgtggggcggacgggagctgggaagtcgtccctgaccctgggcttatttcggatcaacgagtctgccgaaggagagatcatcatcgatggcatcaacatcgccaagatcggcctgcacgacctccgcttcaagatcaccatcatcccccaggaccctgttttgttttcgggttccctccgaatgaacctggacccattcagccagtactcggatgaagaagtctggacgtccctggagctggcccacctgaaggacttcgtgtcagcccttcctgacaagctagaccatgaatgtgcagaaggcggggagaacctcagtgtcgggcagcgccagcttgtgtgcctagcccgggccctgctgaggaagacgaagatccttgtgttggatgaggccacggcagccgtggacctggaaacggacgacctcatccagtccaccatccggacacagttcgaggactgcaccgtcctcaccatcgcccaccggctcaacaccatcatggactacacaagggtgatcgtcttggacaaaggagaaatccaggagtacggcgccccatcggacctcctgcagcagagaggtcttttctacagcatggccaaagacgccggcttggtgtgagccccagagctggcatatctggtcagaactgcagggcctatatgccagcgcccagggaggagtcagtacccctggtaaaccaagcctcccacactgaaaccaaaacataaaaaccaaacccagacaaccaaaacatattcaaagcagcagccaccgccatccggtcccctgcctggaactggctgtgaagacccaggagagacagagatgcgaaccacccaaaacacgcacaccctgcccctggtgccctgagacagacacacagcctcacgcccccaggaatgcaagtggtttcctggtgcttcccacggaggagttttggcagccagacttctggaggaattggttgtatagaagatcctagtgaccaaattcagcctactgcctcggatctctccagccgaagtctgtggactgcaagtctttgagatgcttctggctcccatcacctctaacatccttgtctgggtctaccaggaacgcttcatttccttggggctgcagttttgtggttgaggggcctggagaaaatcattttctccccttggcagtgtcccagggccctggatggtcctcttaccaacatctggtcttccaggcactcaaaagctgggaaccagcatctcagcgccagctctaccagttctcgttttgggccagaggcagcctctgcactcccacgcctgtcctcctggaagggacctggttggactaacggctaacctggacctggaactgtagggccaggggattgtctcagggccgacgttccacctggggcttccctccccacccaccccgactccaggctttcccttttttcttttgttcaacattgtaagaacaatcaatgctgttattactgatcccaccatgattgatgtggggtaaatattaaggagatggcctcatgggaatttgaccttgactagaaatagagactgagagtgagcaaccagctggaaggtactatgccagtcctagcagaaaaatgtgttaggggcctggcccaaagcagtgttggttgcttacagtgttgattgattttgttcttttttcttaccacctcttttctttccctctcatggtacctgctcatggttatgaagctttcaaagtaaagaacacgaaatac

SEQ ID NO: 14701 - DNA, 5749 bp, Homo sapiens
ccaggcggcgttgcggccccggccccggctccctgcgccgccgccgccgccgccgccgccgccgccgccgccgccgccagcgctagcgccagcagccgggcccgatcacccgccgcccggtgcccgccgccgcccgcgccagcaaccgggcccgatcacccgccgcccggtgcccgccgccgcccgcgccaccggcatggcgctccggggcttctgcagcgccgatggctccgacccgctctgggactggaatgtcacgtggaataccagcaaccccgacttcaccaagtgctttcagaacacggtcctcgtgtgggtgccttgtttttacctctgggcctgtttccccttctacttcctctatctctcccgacatgaccgaggctacattcagatgacacctctcaacaaaaccaaaactgccttgggatttttgctgtggatcgtctgctgggcagacctcttctactctttctgggaaagaagtcggggcatattcctggccccagtgtttctggtcagcccaactctcttgggcatcaccacgctgcttgctacctttttaattcagctggagaggaggaagggagttcagtcttcagggatcatgctcactttctggctggtagccctagtgtgtgccctagccatcctgagatccaaaattatgacagccttaaaagaggatgcccaggtggacctgtttcgtgacatcactttctacgtctacttttccctcttactcattcagctcgtcttgtcctgtttctcagatcgctcacccctgttctcggaaaccatccacgaccctaatccctgcccagagtccagcgcttccttcctgtcgaggatcaccttctggtggatcacagggttgattgtccggggctaccgccagcccctggagggcagtgacctctggtccttaaacaaggaggacacgtcggaacaagtcgtgcctgttttggtaaagaactggaagaaggaatgcgccaagactaggaagcagccggtgaaggttgtgtactcctccaaggatcctgcccagccgaaagagagttccaaggtggatgcgaatgaggaggtggaggctttgatcgtcaagtccccacagaaggagtggaacccctctctgtttaaggtgttatacaagacctttgggccctacttcctcatgagcttcttcttcaaggccatccacgacctgatgatgttttccgggccgcagatcttaaagttgctcatcaagttcgtgaatgacacgaaggccccagactggcagggctacttctacaccgtgctgctgtttgtcactgcctgcctgcagaccctcgtgctgcaccagtacttccacatctgcttcgtcagtggcatgaggatcaagaccgctgtcattggggctgtctatcggaaggccctggtgatcaccaattcagccagaaaatcctccacggtcggggagattgtcaacctcatgtctgtggacgctcagaggttcatggacttggccacgtacattaacatgatctggtcagcccccctgcaagtcatccttgctctctacctcctgtggctgaatctgggcccttccgtcctggctggagtggcggtgatggtcctcatggtgcccgtcaatgctgtgatggcgatgaagaccaagacgtatcaggtggcccacatgaagagcaaagacaatcggatcaagctgatgaacgaaattctcaatgggatcaaagtgctaaagctttatgcctgggagctggcattcaaggacaaggtgctggccatcaggcaggaggagctgaaggtgctgaagaagtctgcctacctgtcagccgtgggcaccttcacctgggtctgcacgccctttctggtggccttgtgcacatttgccgtctacgtgaccattgacgagaacaacatcctggatgcccagacagccttcgtgtctttggccttgttcaacatcctccggtttcccctgaacattctccccatggtcatcagcagcatcgtgcaggcgagtgtctccctcaaacgcctgaggatctttctctcccatgaggagctggaacctgacagcatcgagcgacggcctgtcaaagacggcgggggcacgaacagcatcaccgtgaggaatgccacattcacctgggccaggagcgaccctcccacactgaatggcatcaccttctccatccccgaaggtgctttggtggccgtggtgggccaggtgggctgcggaaagtcgtccctgctctcagccctcttggctgagatggacaaagtggaggggcacgtggctatcaagggcgtgaacctgtctgggggccagaagcagcgcgtgagcctggcccgggccgtgtactccaacgctgacatttacctcttcgatgatcccctctcagcagtggatgcccatgtgggaaaacacatctttgaaaatgtgattggccccaaggggatgctgaagaacaagacgcggatcttggtcacgcacagcatgagctacttgccgcaggtggacgtcatcatcgtcatgagtggcggcaagatctctgagatgggctcctaccaggagctgctggctcgagacggcgccttcgctgagttcctgcgtacctatgccagcacagagcaggagcaggatgcagaggagaacggggtcacgggcgtcagcggtccagggaaggaagcaaagcaaatggagaatggcatgctggtgacggacagtgcagggaagcaactgcagagacagctcagcagctcctcctcctatagtggggacatcagcaggcaccacaacagcaccgcagaactgcagaaagctgaggccaagaaggaggagacctggaagctgatggaggctgacaaggcgcagacagggcaggtcaagctttccgtgtactgggactacatgaaggccatcggactcttcatctccttcctcagcatcttccttttcatgtgtaaccatgtgtccgcgctggcttccaactattggctcagcctctggactgatgaccccatcgtcaacgggactcaggagcacacgaaagtccggctgagcgtctatggagccctgggcatttcacaagggatcgccgtgtttggctactccatggccgtgtccatcggggggatcttggcttcccgctgtctgcacgtggacctgctgcacagcatcctgcggtcacccatgagcttctttgagcggacccccagtgggaacctggtgaaccgcttctccaaggagctggacacagtggactccatgatcccggaggtcatcaagatgttcatgggctccctgttcaacgtcattggtgcctgcatcgttatcctgctggccacgcccatcgccgccatcatcatcccgccccttggcctcatctacttcttcgtccagaggttctacgtggcttcctcccggcagctgaagcgcctcgagtcggtcagccgctccccggtctattcccatttcaacgagaccttgctgggggtcagcgtcattcgagccttcgaggagcaggagcgcttcatccaccagagtgacctgaaggtggacgagaaccagaaggcctattaccccagcatcgtggccaacaggtggctggccgtgcggctggagtgtgtgggcaactgcatcgttctgtttgctgccctgtttgcggtgatctccaggcacagcctcagtgctggcttggtgggcctctcagtgtcttactcattgcaggtcaccacgtacttgaactggctggttcggatgtcatctgaaatggaaaccaacatcgtggccgtggagaggctcaaggagtattcagagactgagaaggaggcgccctggcaaatccaggagacagctccgcccagcagctggccccaggtgggccgagtggaattccggaactactgcctgcgctaccgagaggacctggacttcgttctcaggcacatcaatgtcacgatcaatgggggagaaaaggtcggcatcgtggggcggacgggagctgggaagtcgtccctgaccctgggcttatttcggatcaacgagtctgccgaaggagagatcatcatcgatggcatcaacatcgccaagatcggcctgcacgacctccgcttcaagatcaccatcatcccccaggaccctgttttgttttcgggttccctccgaatgaacctggacccattcagccagtactcggatgaagaagtctggacgtccctggagctggcccacctgaaggacttcgtgtcagcccttcctgacaagctagaccatgaatgtgcagaaggcggggagaacctcagtgtcgggcagcgccagcttgtgtgcctagcccgggccctgctgaggaagacgaagatccttgtgttggatgaggccacggcagccgtggacctggaaacggacgacctcatccagtccaccatccggacacagttcgaggactgcaccgtcctcaccatcgcccaccggctcaacaccatcatggactacacaagggtgatcgtcttggacaaaggagaaatccaggagtacggcgccccatcggacctcctgcagcagagaggtcttttctacagcatggccaaagacgccggcttggtgtgagccccagagctggcatatctggtcagaactgcagggcctatatgccagcgcccagggaggagtcagtacccctggtaaaccaagcctcccacactgaaaccaaaacataaaaaccaaacccagacaaccaaaacatattcaaagcagcagccaccgccatccggtcccctgcctggaactggctgtgaagacccaggagagacagagatgcgaaccacccaaaacacgcacaccctgcccctggtgccctgagacagacacacagcctcacgcccccaggaatgcaagtggtttcctggtgcttcccacggaggagttttggcagccagacttctggaggaattggttgtatagaagatcctagtgaccaaattcagcctactgcctcggatctctccagccgaagtctgtggactgcaagtctttgagatgcttctggctcccatcacctctaacatccttgtctgggtctaccaggaacgcttcatttccttggggctgcagttttgtggttgaggggcctggagaaaatcattttctccccttggcagtgtcccagggccctggatggtcctcttaccaacatctggtcttccaggcactcaaaagctgggaaccagcatctcagcgccagctctaccagttctcgttttgggccagaggcagcctctgcactcccacgcctgtcctcctggaagggacctggttggactaacggctaacctggacctggaactgtagggccaggggattgtctcagggccgacgttccacctggggcttccctccccacccaccccgactccaggctttcccttttttcttttgttcaacattgtaagaacaatcaatgctgttattactgatcccaccatgattgatgtggggtaaatattaaggagatggcctcatgggaatttgaccttgactagaaatagagactgagagtgagcaaccagctggaaggtactatgccagtcctagcagaaaaatgtgttaggggcctggcccaaagcagtgttggttgcttacagtgttgattgattttgttcttttttcttaccacctcttttctttccctctcatggtacctgctcatggttatgaagctttcaaagtaaagaacacgaaata

SEQ ID NO: 14702 - DNA, 5759 bp, Homo sapiens
ccaggcggcgttgcggccccggccccggctccctgcgccgccgccgccgccgccgccgccgccgccgccgccgccgccagcgctagcgccagcagccgggcccgatcacccgccgcccggtgcccgccgccgcccgcgccagcaaccgggcccgatcacccgccgcccggtgcccgccgccgcccgcgccaccggcatggcgctccggggcttctgcagcgccgatggctccgacccgctctgggactggaatgtcacgtggaataccagcaaccccgacttcaccaagtgctttcagaacacggtcctcgtgtgggtgccttgtttttacctctgggcctgtttccccttctacttcctctatctctcccgacatgaccgaggctacattcagatgacacctctcaacaaaaccaaaactgccttgggatttttgctgtggatcgtctgctgggcagacctcttctactctttctgggaaagaagtcggggcatattcctggccccagtgtttctggtcagcccaactctcttgggcatcaccacgctgcttgctacctttttaattcagctggagaggaggaagggagttcagtcttcagggatcatgctcactttctggctggtagccctagtgtgtgccctagccatcctgagatccaaaattatgacagccttaaaagaggatgcccaggtggacctgtttcgtgacatcactttctacgtctacttttccctcttactcattcagctcgtcttgtcctgtttctcagatcgctcacccctgttctcggaaaccatccacgaccctaatccctgcccagagtccagcgcttccttcctgtcgaggatcaccttctggtggatcacagggttgattgtccggggctaccgccagcccctggagggcagtgacctctggtccttaaacaaggaggacacgtcggaacaagtcgtgcctgttttggtaaagaactggaagaaggaatgcgccaagactaggaagcagccggtgaaggttgtgtactcctccaaggatcctgcccagccgaaagagagttccaaggtggatgcgaatgaggaggtggaggctttgatcgtcaagtccccacagaaggagtggaacccctctctgtttaaggtgttatacaagacctttgggccctacttcctcatgagcttcttcttcaaggccatccacgacctgatgatgttttccgggccgcagatcttaaagttgctcatcaagttcgtgaatgacacgaaggccccagactggcagggctacttctacaccgtgctgctgtttgtcactgcctgcctgcagaccctcgtgctgcaccagtacttccacatctgcttcgtcagtggcatgaggatcaagaccgctgtcattggggctgtctatcggaaggccctggtgatcaccaattcagccagaaaatcctccacggtcggggagattgtcaacctcatgtctgtggacgctcagaggttcatggacttggccacgtacattaacatgatctggtcagcccccctgcaagtcatccttgctctctacctcctgtggctgaatctgggcccttccgtcctggctggagtggcggtgatggtcctcatggtgcccgtcaatgctgtgatggcgatgaagaccaagacgtatcaggtggcccacatgaagagcaaagacaatcggatcaagctgatgaacgaaattctcaatgggatcaaagtgctaaagctttatgcctgggagctggcattcaaggacaaggtgctggccatcaggcaggaggagctgaaggtgctgaagaagtctgcctacctgtcagccgtgggcaccttcacctgggtctgcacgccctttctggtggccttgtgcacatttgccgtctacgtgaccattgacgagaacaacatcctggatgcccagacagccttcgtgtctttggccttgttcaacatcctccggtttcccctgaacattctccccatggtcatcagcagcatcgtgcaggcgagtgtctccctcaaacgcctgaggatctttctctcccatgaggagctggaacctgacagcatcgagcgacggcctgtcaaagacggcgggggcacgaacagcatcaccgtgaggaatgccacattcacctgggccaggagcgaccctcccacactgaatggcatcaccttctccatccccgaaggtgctttggtggccgtggtgggccaggtgggctgcggaaagtcgtccctgctctcagccctcttggctgagatggacaaagtggaggggcacgtggctatcaagggctccgtggcctatgtgccacagcaggcctggattcagaatgattctctccgagaaaacatcctttttggatgtcagctggaggaaccatattacaggtccgtgatacaggcctgtgccctcctcccagacctggaaatcctgcccagtggggatcggacagagattggcgagaagacgcggatcttggtcacgcacagcatgagctacttgccgcaggtggacgtcatcatcgtcatgagtggcggcaagatctctgagatgggctcctaccaggagctgctggctcgagacggcgccttcgctgagttcctgcgtacctatgccagcacagagcaggagcaggatgcagaggagaacggggtcacgggcgtcagcggtccagggaaggaagcaaagcaaatggagaatggcatgctggtgacggacagtgcagggaagcaactgcagagacagctcagcagctcctcctcctatagtggggacatcagcaggcaccacaacagcaccgcagaactgcagaaagctgaggccaagaaggaggagacctggaagctgatggaggctgacaaggcgcagacagggcaggtcaagctttccgtgtactgggactacatgaaggccatcggactcttcatctccttcctcagcatcttccttttcatgtgtaaccatgtgtccgcgctggcttccaactattggctcagcctctggactgatgaccccatcgtcaacgggactcaggagcacacgaaagtccggctgagcgtctatggagccctgggcatttcacaagggatcgccgtgtttggctactccatggccgtgtccatcggggggatcttggcttcccgctgtctgcacgtggacctgctgcacagcatcctgcggtcacccatgagcttctttgagcggacccccagtgggaacctggtgaaccgcttctccaaggagctggacacagtggactccatgatcccggaggtcatcaagatgttcatgggctccctgttcaacgtcattggtgcctgcatcgttatcctgctggccacgcccatcgccgccatcatcatcccgccccttggcctcatctacttcttcgtccagaggttctacgtggcttcctcccggcagctgaagcgcctcgagtcggtcagccgctccccggtctattcccatttcaacgagaccttgctgggggtcagcgtcattcgagccttcgaggagcaggagcgcttcatccaccagagtgacctgaaggtggacgagaaccagaaggcctattaccccagcatcgtggccaacaggtggctggccgtgcggctggagtgtgtgggcaactgcatcgttctgtttgctgccctgtttgcggtgatctccaggcacagcctcagtgctggcttggtgggcctctcagtgtcttactcattgcaggtcaccacgtacttgaactggctggttcggatgtcatctgaaatggaaaccaacatcgtggccgtggagaggctcaaggagtattcagagactgagaaggaggcgccctggcaaatccaggagacagctccgcccagcagctggccccaggtgggccgagtggaattccggaactactgcctgcgctaccgagaggacctggacttcgttctcaggcacatcaatgtcacgatcaatgggggagaaaaggtcggcatcgtggggcggacgggagctgggaagtcgtccctgaccctgggcttatttcggatcaacgagtctgccgaaggagagatcatcatcgatggcatcaacatcgccaagatcggcctgcacgacctccgcttcaagatcaccatcatcccccaggaccctgttttgttttcgggttccctccgaatgaacctggacccattcagccagtactcggatgaagaagtctggacgtccctggagctggcccacctgaaggacttcgtgtcagcccttcctgacaagctagaccatgaatgtgcagaaggcggggagaacctcagtgtcgggcagcgccagcttgtgtgcctagcccgggccctgctgaggaagacgaagatccttgtgttggatgaggccacggcagccgtggacctggaaacggacgacctcatccagtccaccatccggacacagttcgaggactgcaccgtcctcaccatcgcccaccggctcaacaccatcatggactacacaagggtgatcgtcttggacaaaggagaaatccaggagtacggcgccccatcggacctcctgcagcagagaggtcttttctacagcatggccaaagacgccggcttggtgtgagccccagagctggcatatctggtcagaactgcagggcctatatgccagcgcccagggaggagtcagtacccctggtaaaccaagcctcccacactgaaaccaaaacataaaaaccaaacccagacaaccaaaacatattcaaagcagcagccaccgccatccggtcccctgcctggaactggctgtgaagacccaggagagacagagatgcgaaccacccaaaacacgcacaccctgcccctggtgccctgagacagacacacagcctcacgcccccaggaatgcaagtggtttcctggtgcttcccacggaggagttttggcagccagacttctggaggaattggttgtatagaagatcctagtgaccaaattcagcctactgcctcggatctctccagccgaagtctgtggactgcaagtctttgagatgcttctggctcccatcacctctaacatccttgtctgggtctaccaggaacgcttcatttccttggggctgcagttttgtggttgaggggcctggagaaaatcattttctccccttggcagtgtcccagggccctggatggtcctcttaccaacatctggtcttccaggcactcaaaagctgggaaccagcatctcagcgccagctctaccagttctcgttttgggccagaggcagcctctgcactcccacgcctgtcctcctggaagggacctggttggactaacggctaacctggacctggaactgtagggccaggggattgtctcagggccgacgttccacctggggcttccctccccacccaccccgactccaggctttcccttttttcttttgttcaacattgtaagaacaatcaatgctgttattactgatcccaccatgattgatgtggggtaaatattaaggagatggcctcatgggaatttgaccttgactagaaatagagactgagagtgagcaaccagctggaaggtactatgccagtcctagcagaaaaatgtgttaggggcctggcccaaagcagtgttggttgcttacagtgttgattgattttgttcttttttcttaccacctcttttctttccctctcatggtacctgctcatggttatgaagctttcaaagtaaagaacacgaaatac

SEQ ID NO: 14703 - DNA, 5780 bp, Homo sapiens
ccaggcggcgttgcggccccggccccggctccctgcgccgccgccgccgccgccgccgccgccgccgccgccgccgccagcgctagcgccagcagccgggcccgatcacccgccgcccggtgcccgccgccgcccgcgccagcaaccgggcccgatcacccgccgcccggtgcccgccgccgcccgcgccaccggcatggcgctccggggcttctgcagcgccgatggctccgacccgctctgggactggaatgtcacgtggaataccagcaaccccgacttcaccaagtgctttcagaacacggtcctcgtgtgggtgccttgtttttacctctgggcctgtttccccttctacttcctctatctctcccgacatgaccgaggctacattcagatgacacctctcaacaaaaccaaaactgccttgggatttttgctgtggatcgtctgctgggcagacctcttctactctttctgggaaagaagtcggggcatattcctggccccagtgtttctggtcagcccaactctcttgggcatcaccacgctgcttgctacctttttaattcagctggagaggaggaagggagttcagtcttcagggatcatgctcactttctggctggtagccctagtgtgtgccctagccatcctgagatccaaaattatgacagccttaaaagaggatgcccaggtggacctgtttcgtgacatcactttctacgtctacttttccctcttactcattcagctcgtcttgtcctgtttctcagatcgctcacccctgttctcggaaaccatccacgaccctaatccctgcccagagtccagcgcttccttcctgtcgaggatcaccttctggtggatcacagggttgattgtccggggctaccgccagcccctggagggcagtgacctctggtccttaaacaaggaggacacgtcggaacaagtcgtgcctgttttggtaaagaactggaagaaggaatgcgccaagactaggaagcagccggtgaaggttgtgtactcctccaaggatcctgcccagccgaaagagagttccaaggtggatgcgaatgaggaggtggaggctttgatcgtcaagtccccacagaaggagtggaacccctctctgtttaaggtgttatacaagacctttgggccctacttcctcatgagcttcttcttcaaggccatccacgacctgatgatgttttccgggccgcagatcttaaagttgctcatcaagttcgtgaatgacacgaaggccccagactggcagggctacttctacaccgtgctgctgtttgtcactgcctgcctgcagaccctcgtgctgcaccagtacttccacatctgcttcgtcagtggcatgaggatcaagaccgctgtcattggggctgtctatcggaaggccctggtgatcaccaattcagccagaaaatcctccacggtcggggagattgtcaacctcatgtctgtggacgctcagaggttcatggacttggccacgtacattaacatgatctggtcagcccccctgcaagtcatccttgctctctacctcctgtggctgaatctgggcccttccgtcctggctggagtggcggtgatggtcctcatggtgcccgtcaatgctgtgatggcgatgaagaccaagacgtatcaggtggcccacatgaagagcaaagacaatcggatcaagctgatgaacgaaattctcaatgggatcaaagtgctaaagctttatgcctgggagctggcattcaaggacaaggtgctggccatcaggcaggaggagctgaaggtgctgaagaagtctgcctacctgtcagccgtgggcaccttcacctgggtctgcacgccctttctggcgagtgtctccctcaaacgcctgaggatctttctctcccatgaggagctggaacctgacagcatcgagcgacggcctgtcaaagacggcgggggcacgaacagcatcaccgtgaggaatgccacattcacctgggccaggagcgaccctcccacactgaatggcatcaccttctccatccccgaaggtgctttggtggccgtggtgggccaggtgggctgcggaaagtcgtccctgctctcagccctcttggctgagatggacaaagtggaggggcacgtggctatcaagggctccgtggcctatgtgccacagcaggcctggattcagaatgattctctccgagaaaacatcctttttggatgtcagctggaggaaccatattacaggtccgtgatacaggcctgtgccctcctcccagacctggaaatcctgcccagtggggatcggacagagattggcgagaagggcgtgaacctgtctgggggccagaagcagcgcgtgagcctggcccgggccgtgtactccaacgctgacatttacctcttcgatgatcccctctcagcagtggatgcccatgtgggaaaacacatctttgaaaatgtgattggccccaaggggatgctgaagaacaagacgcggatcttggtcacgcacagcatgagctacttgccgcaggtggacgtcatcatcgtcatgagtggcggcaagatctctgagatgggctcctaccaggagctgctggctcgagacggcgccttcgctgagttcctgcgtacctatgccagcacagagcaggagcaggatgcagaggagaacggggtcacgggcgtcagcggtccagggaaggaagcaaagcaaatggagaatggcatgctggtgacggacagtgcagggaagcaactgcagagacagctcagcagctcctcctcctatagtggggacatcagcaggcaccacaacagcaccgcagaactgcagaaagctgaggccaagaaggaggagacctggaagctgatggaggctgacaaggcgcagacagggcaggtcaagctttccgtgtactgggactacatgaaggccatcggactcttcatctccttcctcagcatcttccttttcatgtgtaaccatgtgtccgcgctggcttccaactattggctcagcctctggactgatgaccccatcgtcaacgggactcaggagcacacgaaagtccggctgagcgtctatggagccctgggcatttcacaagggatcgccgtgtttggctactccatggccgtgtccatcggggggatcttggcttcccgctgtctgcacgtggacctgctgcacagcatcctgcggtcacccatgagcttctttgagcggacccccagtgggaacctggtgaaccgcttctccaaggagctggacacagtggactccatgatcccggaggtcatcaagatgttcatgggctccctgttcaacgtcattggtgcctgcatcgttatcctgctggccacgcccatcgccgccatcatcatcccgccccttggcctcatctacttcttcgtccagaggttctacgtggcttcctcccggcagctgaagcgcctcgagtcggtcagccgctccccggtctattcccatttcaacgagaccttgctgggggtcagcgtcattcgagccttcgaggagcaggagcgcttcatccaccagagtgacctgaaggtggacgagaaccagaaggcctattaccccagcatcgtggccaacaggtggctggccgtgcggctggagtgtgtgggcaactgcatcgttctgtttgctgccctgtttgcggtgatctccaggcacagcctcagtgctggcttggtgggcctctcagtgtcttactcattgcaggtcaccacgtacttgaactggctggttcggatgtcatctgaaatggaaaccaacatcgtggccgtggagaggctcaaggagtattcagagactgagaaggaggcgccctggcaaatccaggagacagctccgcccagcagctggccccaggtgggccgagtggaattccggaactactgcctgcgctaccgagaggacctggacttcgttctcaggcacatcaatgtcacgatcaatgggggagaaaaggtcggcatcgtggggcggacgggagctgggaagtcgtccctgaccctgggcttatttcggatcaacgagtctgccgaaggagagatcatcatcgatggcatcaacatcgccaagatcggcctgcacgacctccgcttcaagatcaccatcatcccccaggaccctgttttgttttcgggttccctccgaatgaacctggacccattcagccagtactcggatgaagaagtctggacgtccctggagctggcccacctgaaggacttcgtgtcagcccttcctgacaagctagaccatgaatgtgcagaaggcggggagaacctcagtgtcgggcagcgccagcttgtgtgcctagcccgggccctgctgaggaagacgaagatccttgtgttggatgaggccacggcagccgtggacctggaaacggacgacctcatccagtccaccatccggacacagttcgaggactgcaccgtcctcaccatcgcccaccggctcaacaccatcatggactacacaagggtgatcgtcttggacaaaggagaaatccaggagtacggcgccccatcggacctcctgcagcagagaggtcttttctacagcatggccaaagacgccggcttggtgtgagccccagagctggcatatctggtcagaactgcagggcctatatgccagcgcccagggaggagtcagtacccctggtaaaccaagcctcccacactgaaaccaaaacataaaaaccaaacccagacaaccaaaacatattcaaagcagcagccaccgccatccggtcccctgcctggaactggctgtgaagacccaggagagacagagatgcgaaccacccaaaacacgcacaccctgcccctggtgccctgagacagacacacagcctcacgcccccaggaatgcaagtggtttcctggtgcttcccacggaggagttttggcagccagacttctggaggaattggttgtatagaagatcctagtgaccaaattcagcctactgcctcggatctctccagccgaagtctgtggactgcaagtctttgagatgcttctggctcccatcacctctaacatccttgtctgggtctaccaggaacgcttcatttccttggggctgcagttttgtggttgaggggcctggagaaaatcattttctccccttggcagtgtcccagggccctggatggtcctcttaccaacatctggtcttccaggcactcaaaagctgggaaccagcatctcagcgccagctctaccagttctcgttttgggccagaggcagcctctgcactcccacgcctgtcctcctggaagggacctggttggactaacggctaacctggacctggaactgtagggccaggggattgtctcagggccgacgttccacctggggcttccctccccacccaccccgactccaggctttcccttttttcttttgttcaacattgtaagaacaatcaatgctgttattactgatcccaccatgattgatgtggggtaaatattaaggagatggcctcatgggaatttgaccttgactagaaatagagactgagagtgagcaaccagctggaaggtactatgccagtcctagcagaaaaatgtgttaggggcctggcccaaagcagtgttggttgcttacagtgttgattgattttgttcttttttcttaccacctcttttctttccctctcatggtacctgctcatggttatgaagctttcaaagtaaagaacacgaaatac

SEQ ID NO: 14704 - DNA, 5732 bp, Homo sapiens
ccaggcggcgttgcggccccggccccggctccctgcgccgccgccgccgccgccgccgccgccgccgccgccgccgccagcgctagcgccagcagccgggcccgatcacccgccgcccggtgcccgccgccgcccgcgccagcaaccgggcccgatcacccgccgcccggtgcccgccgccgcccgcgccaccggcatggcgctccggggcttctgcagcgccgatggctccgacccgctctgggactggaatgtcacgtggaataccagcaaccccgacttcaccaagtgctttcagaacacggtcctcgtgtgggtgccttgtttttacctctgggcctgtttccccttctacttcctctatctctcccgacatgaccgaggctacattcagatgacacctctcaacaaaaccaaaactgccttgggatttttgctgtggatcgtctgctgggcagacctcttctactctttctgggaaagaagtcggggcatattcctggccccagtgtttctggtcagcccaactctcttgggcatcaccacgctgcttgctacctttttaattcagctggagaggaggaagggagttcagtcttcagggatcatgctcactttctggctggtagccctagtgtgtgccctagccatcctgagatccaaaattatgacagccttaaaagaggatgcccaggtggacctgtttcgtgacatcactttctacgtctacttttccctcttactcattcagctcgtcttgtcctgtttctcagatcgctcacccctgttctcggaaaccatccacgaccctaatccctgcccagagtccagcgcttccttcctgtcgaggatcaccttctggtggatcacagggttgattgtccggggctaccgccagcccctggagggcagtgacctctggtccttaaacaaggaggacacgtcggaacaagtcgtgcctgttttggtaaagaactggaagaaggaatgcgccaagactaggaagcagccggtgaaggttgtgtactcctccaaggatcctgcccagccgaaagagagttccaaggtggatgcgaatgaggaggtggaggctttgatcgtcaagtccccacagaaggagtggaacccctctctgtttaaggtgttatacaagacctttgggccctacttcctcatgagcttcttcttcaaggccatccacgacctgatgatgttttccgggccgcagatcttaaagttgctcatcaagttcgtgaatgacacgaaggccccagactggcagggctacttctacaccgtgctgctgtttgtcactgcctgcctgcagaccctcgtgctgcaccagtacttccacatctgcttcgtcagtggcatgaggatcaagaccgctgtcattggggctgtctatcggaaggccctggtgatcaccaattcagccagaaaatcctccacggtcggggagattgtcaacctcatgtctgtggacgctcagaggttcatggacttggccacgtacattaacatgatctggtcagcccccctgcaagtcatccttgctctctacctcctgtggctgaatctgggcccttccgtcctggctggagtggcggtgatggtcctcatggtgcccgtcaatgctgtgatggcgatgaagaccaagacgtatcaggtggcccacatgaagagcaaagacaatcggatcaagctgatgaacgaaattctcaatgggatcaaagtgctaaagctttatgcctgggagctggcattcaaggacaaggtgctggccatcaggcaggaggagctgaaggtgctgaagaagtctgcctacctgtcagccgtgggcaccttcacctgggtctgcacgccctttctggtggccttgtgcacatttgccgtctacgtgaccattgacgagaacaacatcctggatgcccagacagccttcgtgtctttggccttgttcaacatcctccggtttcccctgaacattctccccatggtcatcagcagcatcgtgcaggcgagtgtctccctcaaacgcctgaggatctttctctcccatgaggagctggaacctgacagcatcgagcgacggcctgtcaaagacggcgggggcacgaacagcatcaccgtgaggaatgccacattcacctgggccaggagcgaccctcccacactgaatggcatcaccttctccatccccgaaggtgctttggtggccgtggtgggccaggtgggctgcggaaagtcgtccctgctctcagccctcttggctgagatggacaaagtggaggggcacgtggctatcaagggctccgtggcctatgtgccacagcaggcctggattcagaatgattctctccgagaaaacatcctttttggatgtcagctggaggaaccatattacaggtccgtgatacaggcctgtgccctcctcccagacctggaaatcctgcccagtggggatcggacagagattggcgagaagggcgtgaacctgtctgggggccagaagcagcgcgtgagcctggcccgggccgtgtactccaacgctgacatttacctcttcgatgatcccctctcagcagtggatgcccatgtgggaaaacacatctttgaaaatgtgattggccccaaggggatgctgaagaacaagacgcggatcttggtcacgcacagcatgagctacttgccgcaggtggacgtcatcatcgtcatgagtggcggcaagatctctgagatgggctcctaccaggagctgctggctcgagacggcgccttcgctgagttcctgcgtacctatgccagcacagagcaggagcaggatgcagaggagaacggggtcacgggcgtcagcggtccagggaaggaagcaaagcaaatggagaatggcatgctggtgacggacagtgcagggaagcaactgcagagacagctcagcagctcctcctcctatagtggggacatcagcaggcaccacaacagcaccgcagaactgcagaaagctgaggccaagaaggaggagacctggaagctgatggaggctgacaaggcgcagacagggcaggtcaagctttccgtgtactgggactacatgaaggccatcggactcttcatctccttcctcagcatcttccttttcatgtgtaaccatgtgtccgcgctggcttccaactattggctcagcctctggactgatgaccccatcgtcaacgggactcaggagcacacgaaagtccggctgagcgtctatggagccctgggcatttcacaagggatcgccgtgtttggctactccatggccgtgtccatcggggggatcttggcttcccgctgtctgcacgtggacctgctgcacagcatcctgcggtcacccatgagcttctttgagcggacccccagtgggaacctggtgaaccgcttctccaaggagctggacacagtggactccatgatcccggaggtcatcaagatgttcatgggctccctgttcaacgtcattggtgcctgcatcgttatcctgctggccacgcccatcgccgccatcatcatcccgccccttggcctcatctacttcttcgtccagaggttctacgtggcttcctcccggcagctgaagcgcctcgagtcggtcagccgctccccggtctattcccatttcaacgagaccttgctgggggtcagcgtcattcgagccttcgaggagcaggagcgcttcatccaccagagtgacctgaaggtggacgagaaccagaaggcctattaccccagcatcgtggccaacaggtggctggccgtgcggctggagtgtgtgggcaactgcatcgttctgtttgctgccctgtttgcggtgatctccaggcacagcctcagtgctggcttggtgggcctctcagtgtcttactcattgcaggtcaccacgtacttgaactggctggttcggatgtcatctgaaatggaaaccaacatcgtggccgtggagaggctcaaggagtattcagagactgagaaggaggcgccctggcaaatccaggagacagctccgcccagcagctggccccaggtgggccgagtggaattccggaactactgcctgcgctaccgagaggacctggacttcgttctcaggcacatcaatgtcacgatcaatgggggagaaaaggtcggcatcgtggggcggacgggagctgggaagtcgtccctgaccctgggcttatttcggatcaacgagtctgccgaaggagagatcatcatcgatggcatcaacatcgccaagatcggcctgcacgacctccgcttcaagatcaccatcatcccccaggaccctgttttgttttcgggttccctccgaatgaacctggacccattcagccagtactcggatgaagaagtctggacgtccctggagctggcccacctgaaggacttcgtgtcagcccttcctgacaagctagaccatgaatgtgcagaaggcggggagaacctcagggtgatcgtcttggacaaaggagaaatccaggagtacggcgccccatcggacctcctgcagcagagaggtcttttctacagcatggccaaagacgccggcttggtgtgagccccagagctggcatatctggtcagaactgcagggcctatatgccagcgcccagggaggagtcagtacccctggtaaaccaagcctcccacactgaaaccaaaacataaaaaccaaacccagacaaccaaaacatattcaaagcagcagccaccgccatccggtcccctgcctggaactggctgtgaagacccaggagagacagagatgcgaaccacccaaaacacgcacaccctgcccctggtgccctgagacagacacacagcctcacgcccccaggaatgcaagtggtttcctggtgcttcccacggaggagttttggcagccagacttctggaggaattggttgtatagaagatcctagtgaccaaattcagcctactgcctcggatctctccagccgaagtctgtggactgcaagtctttgagatgcttctggctcccatcacctctaacatccttgtctgggtctaccaggaacgcttcatttccttggggctgcagttttgtggttgaggggcctggagaaaatcattttctccccttggcagtgtcccagggccctggatggtcctcttaccaacatctggtcttccaggcactcaaaagctgggaaccagcatctcagcgccagctctaccagttctcgttttgggccagaggcagcctctgcactcccacgcctgtcctcctggaagggacctggttggactaacggctaacctggacctggaactgtagggccaggggattgtctcagggccgacgttccacctggggcttccctccccacccaccccgactccaggctttcccttttttcttttgttcaacattgtaagaacaatcaatgctgttattactgatcccaccatgattgatgtggggtaaatattaaggagatggcctcatgggaatttgaccttgactagaaatagagactgagagtgagcaaccagctggaaggtactatgccagtcctagcagaaaaatgtgttaggggcctggcccaaagcagtgttggttgcttacagtgttgattgattttgttcttttttcttaccacctcttttctttccctctcatggtacctgctcatggttatgaagctttcaaagtaaagaacacgaaatac

SEQ ID NO: 14705 - DNA, 5801 bp, Homo sapiens
ccaggcggcgttgcggccccggccccggctccctgcgccgccgccgccgccgccgccgccgccgccgccgccgccgccagcgctagcgccagcagccgggcccgatcacccgccgcccggtgcccgccgccgcccgcgccagcaaccgggcccgatcacccgccgcccggtgcccgccgccgcccgcgccaccggcatggcgctccggggcttctgcagcgccgatggctccgacccgctctgggactggaatgtcacgtggaataccagcaaccccgacttcaccaagtgctttcagaacacggtcctcgtgtgggtgccttgtttttacctctgggcctgtttccccttctacttcctctatctctcccgacatgaccgaggctacattcagatgacacctctcaacaaaaccaaaactgccttgggatttttgctgtggatcgtctgctgggcagacctcttctactctttctgggaaagaagtcggggcatattcctggccccagtgtttctggtcagcccaactctcttgggcatcaccacgctgcttgctacctttttaattcagctggagaggaggaagggagttcagtcttcagggatcatgctcactttctggctggtagccctagtgtgtgccctagccatcctgagatccaaaattatgacagccttaaaagagaatccctgcccagagtccagcgcttccttcctgtcgaggatcaccttctggtggatcacagggttgattgtccggggctaccgccagcccctggagggcagtgacctctggtccttaaacaaggaggacacgtcggaacaagtcgtgcctgttttggtaaagaactggaagaaggaatgcgccaagactaggaagcagccggtgaaggttgtgtactcctccaaggatcctgcccagccgaaagagagttccaaggtggatgcgaatgaggaggtggaggctttgatcgtcaagtccccacagaaggagtggaacccctctctgtttaaggtgttatacaagacctttgggccctacttcctcatgagcttcttcttcaaggccatccacgacctgatgatgttttccgggccgcagatcttaaagttgctcatcaagttcgtgaatgacacgaaggccccagactggcagggctacttctacaccgtgctgctgtttgtcactgcctgcctgcagaccctcgtgctgcaccagtacttccacatctgcttcgtcagtggcatgaggatcaagaccgctgtcattggggctgtctatcggaaggccctggtgatcaccaattcagccagaaaatcctccacggtcggggagattgtcaacctcatgtctgtggacgctcagaggttcatggacttggccacgtacattaacatgatctggtcagcccccctgcaagtcatccttgctctctacctcctgtggctgaatctgggcccttccgtcctggctggagtggcggtgatggtcctcatggtgcccgtcaatgctgtgatggcgatgaagaccaagacgtatcaggtggcccacatgaagagcaaagacaatcggatcaagctgatgaacgaaattctcaatgggatcaaagtgctaaagctttatgcctgggagctggcattcaaggacaaggtgctggccatcaggcaggaggagctgaaggtgctgaagaagtctgcctacctgtcagccgtgggcaccttcacctgggtctgcacgccctttctggtggccttgtgcacatttgccgtctacgtgaccattgacgagaacaacatcctggatgcccagacagccttcgtgtctttggccttgttcaacatcctccggtttcccctgaacattctccccatggtcatcagcagcatcgtgcaggcgagtgtctccctcaaacgcctgaggatctttctctcccatgaggagctggaacctgacagcatcgagcgacggcctgtcaaagacggcgggggcacgaacagcatcaccgtgaggaatgccacattcacctgggccaggagcgaccctcccacactgaatggcatcaccttctccatccccgaaggtgctttggtggccgtggtgggccaggtgggctgcggaaagtcgtccctgctctcagccctcttggctgagatggacaaagtggaggggcacgtggctatcaagggctccgtggcctatgtgccacagcaggcctggattcagaatgattctctccgagaaaacatcctttttggatgtcagctggaggaaccatattacaggtccgtgatacaggcctgtgccctcctcccagacctggaaatcctgcccagtggggatcggacagagattggcgagaagggcgtgaacctgtctgggggccagaagcagcgcgtgagcctggcccgggccgtgtactccaacgctgacatttacctcttcgatgatcccctctcagcagtggatgcccatgtgggaaaacacatctttgaaaatgtgattggccccaaggggatgctgaagaacaagacgcggatcttggtcacgcacagcatgagctacttgccgcaggtggacgtcatcatcgtcatgagtggcggcaagatctctgagatgggctcctaccaggagctgctggctcgagacggcgccttcgctgagttcctgcgtacctatgccagcacagagcaggagcaggatgcagaggagaacggggtcacgggcgtcagcggtccagggaaggaagcaaagcaaatggagaatggcatgctggtgacggacagtgcagggaagcaactgcagagacagctcagcagctcctcctcctatagtggggacatcagcaggcaccacaacagcaccgcagaactgcagaaagctgaggccaagaaggaggagacctggaagctgatggaggctgacaaggcgcagacagggcaggtcaagctttccgtgtactgggactacatgaaggccatcggactcttcatctccttcctcagcatcttccttttcatgtgtaaccatgtgtccgcgctggcttccaactattggctcagcctctggactgatgaccccatcgtcaacgggactcaggagcacacgaaagtccggctgagcgtctatggagccctgggcatttcacaagggatcgccgtgtttggctactccatggccgtgtccatcggggggatcttggcttcccgctgtctgcacgtggacctgctgcacagcatcctgcggtcacccatgagcttctttgagcggacccccagtgggaacctggtgaaccgcttctccaaggagctggacacagtggactccatgatcccggaggtcatcaagatgttcatgggctccctgttcaacgtcattggtgcctgcatcgttatcctgctggccacgcccatcgccgccatcatcatcccgccccttggcctcatctacttcttcgtccagaggttctacgtggcttcctcccggcagctgaagcgcctcgagtcggtcagccgctccccggtctattcccatttcaacgagaccttgctgggggtcagcgtcattcgagccttcgaggagcaggagcgcttcatccaccagagtgacctgaaggtggacgagaaccagaaggcctattaccccagcatcgtggccaacaggtggctggccgtgcggctggagtgtgtgggcaactgcatcgttctgtttgctgccctgtttgcggtgatctccaggcacagcctcagtgctggcttggtgggcctctcagtgtcttactcattgcaggtcaccacgtacttgaactggctggttcggatgtcatctgaaatggaaaccaacatcgtggccgtggagaggctcaaggagtattcagagactgagaaggaggcgccctggcaaatccaggagacagctccgcccagcagctggccccaggtgggccgagtggaattccggaactactgcctgcgctaccgagaggacctggacttcgttctcaggcacatcaatgtcacgatcaatgggggagaaaaggtcggcatcgtggggcggacgggagctgggaagtcgtccctgaccctgggcttatttcggatcaacgagtctgccgaaggagagatcatcatcgatggcatcaacatcgccaagatcggcctgcacgacctccgcttcaagatcaccatcatcccccaggaccctgttttgttttcgggttccctccgaatgaacctggacccattcagccagtactcggatgaagaagtctggacgtccctggagctggcccacctgaaggacttcgtgtcagcccttcctgacaagctagaccatgaatgtgcagaaggcggggagaacctcagtgtcgggcagcgccagcttgtgtgcctagcccgggccctgctgaggaagacgaagatccttgtgttggatgaggccacggcagccgtggacctggaaacggacgacctcatccagtccaccatccggacacagttcgaggactgcaccgtcctcaccatcgcccaccggctcaacaccatcatggactacacaagggtgatcgtcttggacaaaggagaaatccaggagtacggcgccccatcggacctcctgcagcagagaggtcttttctacagcatggccaaagacgccggcttggtgtgagccccagagctggcatatctggtcagaactgcagggcctatatgccagcgcccagggaggagtcagtacccctggtaaaccaagcctcccacactgaaaccaaaacataaaaaccaaacccagacaaccaaaacatattcaaagcagcagccaccgccatccggtcccctgcctggaactggctgtgaagacccaggagagacagagatgcgaaccacccaaaacacgcacaccctgcccctggtgccctgagacagacacacagcctcacgcccccaggaatgcaagtggtttcctggtgcttcccacggaggagttttggcagccagacttctggaggaattggttgtatagaagatcctagtgaccaaattcagcctactgcctcggatctctccagccgaagtctgtggactgcaagtctttgagatgcttctggctcccatcacctctaacatccttgtctgggtctaccaggaacgcttcatttccttggggctgcagttttgtggttgaggggcctggagaaaatcattttctccccttggcagtgtcccagggccctggatggtcctcttaccaacatctggtcttccaggcactcaaaagctgggaaccagcatctcagcgccagctctaccagttctcgttttgggccagaggcagcctctgcactcccacgcctgtcctcctggaagggacctggttggactaacggctaacctggacctggaactgtagggccaggggattgtctcagggccgacgttccacctggggcttccctccccacccaccccgactccaggctttcccttttttcttttgttcaacattgtaagaacaatcaatgctgttattactgatcccaccatgattgatgtggggtaaatattaaggagatggcctcatgggaatttgaccttgactagaaatagagactgagagtgagcaaccagctggaaggtactatgccagtcctagcagaaaaatgtgttaggggcctggcccaaagcagtgttggttgcttacagtgttgattgattttgttcttttttcttaccacctcttttctttccctctcatggtacctgctcatggttatgaagctttcaaagtaaagaacacgaaatac

SEQ ID NO: 14706 - DNA, 2452 bp, Homo sapiens
agtcttccagggcggcggtgggtgtccgcttctctctgctcttcgactgcaccgcactcgcgcgtgaccctgactccccctagtcagctcagcggtgctgccatggcgtggcggcggcgcgaagccagcgtcggggctcgcggcgtgttggctctggcgttgctcgccctggccctgtgcgtgcccggggcccggggccgggctctcgagtggttctcggccgtggtaaacatcgagtacgtggacccgcagaccaacctgacggtgtggagcgtctcggagagtggccgcttcggcgacagctcgcccaaggagggcgcgcatggcctggtgggcgtcccgtgggcgcccggcggagacctcgagggctgcgcgcccgacacgcgcttcttcgtgcccgagcccggcggccgaggggccgcgccctgggtcgccctggtggctcgtgggggctgcaccttcaaggacaaggtgctggtggcggcgcggaggaacgcctcggccgtcgtcctctacaatgaggagcgctacgggaacatcaccttgcccatgtctcacgcgggaacaggaaatatagtggtcattatgattagctatccaaaaggaagagaaattttggagctggtgcaaaaaggaattccagtaacgatgaccataggggttggcacccggcatgtacaggagttcatcagcggtcagtctgtggtgtttgtggccattgccttcatcaccatgatgattatctcgttagcctggctaatattttactatatacagcgtttcctatatactggctctcagattggaagtcagagccatagaaaagaaactaagaaagttattggccagcttctacttcatactgtaaagcatggagaaaagggaattgatgttgatgctgaaaattgtgcagtgtgtattgaaaatttcaaagtaaaggatattattagaattctgccatgcaagcatatttttcatagaatatgcattgacccatggcttttggatcaccgaacatgtccaatgtgtaaacttgatgtcatcaaagccctaggatattggggagagcctggggatgtacaggagatgcctgctccagaatctcctcctggaagggatccagctgcaaatttgagtctagctttaccagatgatgacggaagtgatgagagcagtccaccatcagcctcccctgctgaatctgagccacagtgtgatcccagctttaaaggagatgcaggagaaaatacggcattgctagaagccggcaggagtgactctcggcatggaggacccatctcctagcacacgtgcccactgaagtggcaccaacagaagtttggcttgaactaaaggacattttattttttttactttagcacataatttgtatatttgaaaataatgtatattattttacctattagattctgatttgatatacaaaggactaagatattttcttcttgaagagacttttcgattagtcctcatatatttatctactaaaatagagtgtttaccatgaacagtgtgttgcttcagactattacaaagacaactggggcaggtactctaatataaaggacaggtggtgtttctaaataattggctgctatggttctgtaaaaaccagttaattctatttttcaaggtttttggcaaagcacatcaatgttagactagttgaagtggaattgtataattcaattcgataattgatctcatgggctttccctggaggaaaggttttttttgttgttttttttttaagaacttgaaacttgtaaactgagatgtctgtagcttttttgcccatctgtagtgtatgtgaagatttcaaaacctgagagcactttttctttgtttagaattatgagaaaggcactagatgactttaggatttgcatttttccctttattgcctcatttcttgtgacgccttgttggggagggaaatctgtttattttttcctacaaataaaaagctaagattctatatcgcacatgagcattaagttcttcattgccttgttaaggaaaatgagtaggcagactcagaatctgttatattgatttcagttacaatttaatctttacaattaaaagggcgaaagatgtagaattttagtttttgttgttgactcgaaataaccagttttcttgattagagtttaagcagatttaataccatgaccttgcttaaccgtttcttcttttttacttgcttgctgttcttttgggtcaaaggagcaggctaatgcaaagcttttggagactgctaagtgttaaaaagtgattaaacacacactctgctattttttcacttcttggaggtagaagtcgagtatgaggcagttattttttagagtgtggaattatagtctttccttgctcctagttattctgtatatctttactttgtaggtaaaaataaatgtttatttaaaac

SEQ ID NO: 14707 - DNA, 1582 bp, Homo sapiens
cctcagtcagcccccgggggaggccatgaacgccacggggaccccggtggcccccgagtcctgccaacagctggcggccggcgggcacagccggctcattgttctgcactacaaccactcgggccggctggccgggcgcggggggccggaggatggcggcctgggggccctgcgggggctgtcggtggccgccagctgcctggtggtgctggagaacttgctggtgctggcggccatcaccagccacatgcggtcgcgacgctgggtctactattgcctggtgaacatcacgctgagtgacctgctcacgggcgcggcctacctggccaacgtgctgctgtcgggggcccgcaccttccgtctggcgcccgcccagtggttcctacgggagggcctgctcttcaccgccctggccgcctccaccttcagcctgctcttcactgcaggggagcgctttgccaccatggtgcggccggtggccgagagcggggccaccaagaccagccgcgtctacggcttcatcggcctctgctggctgctggccgcgctgctggggatgctgcctttgctgggctggaactgcctgtgcgcctttgaccgctgctccagccttctgcccctctactccaagcgctacatcctcttctgcctggtgatcttcgccggcgtcctggccaccatcatgggcctctatggggccatcttccgcctggtgcaggccagcgggcagaaggccccacgcccagcggcccgccgcaaggcccgccgcctgctgaagacggtgctgatgatcctgctggccttcctggtgtgctggggcccactcttcgggctgctgctggccgacgtctttggctccaacctctgggcccaggagtacctgcggggcatggactggatcctggccctggccgtcctcaactcggcggtcaaccccatcatctactccttccgcagcagggaggtgtgcagagccgtgctcagcttcctctgctgcgggtgtctccggctgggcatgcgagggcccggggactgcctggcccgggccgtcgaggctcactccggagcttccaccaccgacagctctctgaggccaagggacagctttcgcggctcccgctcgctcagctttcggatgcgggagcccctgtccagcatctccagcgtgcggagcatctgaagttgcagtcttgcgtgtggatggtgcagccaccgggtgcgtgccaggcaggccctcctggggtacaggaagctgtgtgcacgcagcctcgcctgtatggggagcagggaacgggacaggcccccatggtcttcccggtggcctctcggggcttctgacgccaaatgggcttcccatggtcaccctggacaaggaggcaaccaccccacctccccgtaggagcagagagcaccctggtgtgggggcgagtgggttccccacaaccccgcttctgtgtgattctggggaagtcccggcccctctctgggcctcagtagggctcccaggctgcaaggggtggactgtgggatgcatgccctggcaacattgaagttcgatcatggtaaaaaaaaaaaaaaaaaa

SEQ ID NO: 14708 - DNA, 1720 bp, Homo sapiens
agagcagggcctgacatctccccagaacagacgtttgaacagagcaggcttctgaggtctccaaaatgcctgtcccagcctcctggccccatcctcctggtcctttcctgcttctgactctactgctgggacttacagaagtggcaggtgaggaggagctacagatgattcagcctgagaagctcctgttggtcacagttggaaagacagccactctgcactgcactgtgacctccctgcttcccgtgggacccgtcctgtggttcagaggagttggaccaggccgggaattaatctacaatcaaaaagaaggccacttccccagggtaacaacagtttcagacctcacaaagagaaacaacatggacttttccatccgcatcagtagcatcaccccagcagatgtcggcacatactactgtgtgaagtttcgaaaagggagccctgagaacgtggagtttaagtctggaccaggcactgagatggctttgggtgccaaaccctctgcccccgtggtattgggccctgcggcgaggaccacacctgagcatacagtgagtttcacctgtgagtcccatggcttctctcccagagacatcaccctgaaatggttcaaaaatgggaatgagctctcagacttccagaccaacgtggaccccacaggacagagtgtggcctacagcatccgcagcacagccagggtggtactggacccctgggacgttcgctctcaggtcatctgcgaggtggcccatgtcaccttgcagggggaccctcttcgtgggactgccaacttgtctgaggccatccgagttccacccaccttggaggttactcaacagcccatgagggtggggaaccaggtaaacgtcacctgccaggtgaggaagttctacccccagagcctacagctgacctggtcggagaatggaaacgtgtgccagagagaaacagcctcgacccttacagagaacaaggatggtacctacaactggacaagctggttcctggtgaacatatctgaccaaagggatgatgtggtcctcacctgccaggtgaagcatgatgggcagctggcggtcagcaaacgccttgccctagaggtcacagtccaccagaaggaccagagctcagatgctacccctggcccggcatcatcccttactgcgctgctcctcatagctgtcctcctgggccccatctacgtcccctggaagcagaagacctgactctccttccttcctcccctgccacgtgggaccctcatctctgctgcctccttcctttcctgagaggctcagcttgagagaatgagccagtgagaagcttctctagacttggctccaaacatctcccctcccaagacatctgcctgcccacaggctcctgttgctccttcacacagacctggatgccccagagcaaggtcttcattcatggtcctgagcaggtgccatgggattgggctctgggcactgacttaacggcacctccctagaaggcgagaaacatgccaaatctaaacacaccaggactcccatccatcgccttgagactgaccgtaaaccacagacgctctccaggttctcaagagttatcctgccttccagattcctgcctatcccaactccccagccttgttgaggttctctattgcctcttgaatacaaatgcactcccaaagtggttttaagaaaataaaaagattatccttccaaaa

SEQ ID NO: 14709 - DNA, 3804 bp, Homo sapiens
cacagacgtttggacagagcaggctcctaaggtctccagaatgcccgtgccagcctcctggccccaccttcctagtcctttcctgctgatgacgctactgctggggagactcacaggagtggcaggtgaggacgagctacaggtgattcagcctgaaaagtccgtatcagttgcagctggagagtcggccactctgcgctgtgctatgacgtccctgatccctgtggggcccatcatgtggtttagaggagctggagcaggccgggaattaatctacaatcagaaagaaggccacttcccacgggtaacaactgtttcagaactcacaaagagaaacaacctgaacttttccatcagcatcagtaacatcaccccagcagacgccggcacctactactgtgtgaagttccggaaagggagccctgacgacgtggagtttaagtctggagcaggcactgagctgtctgtgcgcgccaaaccctctgcccccgtggtatcgggccctgcggtgagggccacacctgagcacacagtgagcttcacctgcgagtcccatggcttctctcccagagacatcaccctgaaatggttcaaaaatgggaatgagctctcagacttccagaccaacgtggaccccgcaggagacagtgtgtcctacagcatccacagcacagccagggtggtgctgacccgtggggacgttcactctcaagtcatctgcgagatggcccacatcaccttgcagggggaccctcttcgtgggactgccaacttgtctgaggccatccgagttccacccaccttggaggttactcaacagcccatgagggcagagaaccaggcaaacgtcacctgccaggtgagcaatttctacccccggggactacagctgacctggttggagaatggaaatgtgtcccggacagaaacagcttcgaccctcatagagaacaaggatggcacctacaactggatgagctggctcctggtgaacacctgtgcccacagggacgatgtggtgctcacctgtcaggtggagcatgatgggcagcaagcagtcagcaaaagctatgccctggagatctcagcacaccagaaggagcacggctcagatatcacccatgaaccagcgctggctcctactgctccactcctcgtagctctcctcctgggccccaagctgctactggtggttggtgtctctgccatctacatctgctggaaacagaaggcctgactgaccctcagtctctgctgcctcctcctttcttgagaagctcagcctgagagaaggagctggcgagaaccttccccacactcagctccaaacgcctcctctcccaggtcatctgcctgcccacacgctcctgttccaccttcacaagaccatgatgccccaaagcagtgtctctattcacggtcctgagcaggggccatgggattgggctctgggcactgactcatggcacctccctagaaggtgagaaacactccaaatctaaacacaccaggacttctcccatccgtcgccttgggactggccataaaccacagactctctccaggctctcaagagttatcctgtcttctggattcctgcctaccccaactcccccagccttgttgaggttctctactgcctcctgaatacacatgaacccctataccaattttaagaaaaaaatgattctctttcctctttgtccaagcatcctatccctcaaacccaaaaagaaagaagctctcccttctctctctgtgatggagacagtatttcttctagtatcctgcagccttcccagtcctgctgcttgtggtagaaattgctgccacagcccaacattgaggagccctcgatgactgccctttacaactcatattcagttctgcctccaaaatgcatgtgtccacttacatgagatggtaaatgtttaacaatggactttctgaaagggaaaaaccaaaagctgttttgcagtgcttgccaatttctctagtgtaataactcccaacctgaccaatttcagcactgccaacagttaaacaaccagattcgaagattcctgaaatttaacaattggttttcagggcccagtccaagcctgctgctggaaacctcagagttaaatccctattctccacacctctcacctccaccacccctccctgtcccagccagcatcatctctttggggaccactcctctggctttcatttttcagccacagtgattctttggaaaagtcaaatcatatcacttctctgcttcttccccaacacagctgcatggtcccgctctccctccttcaagtctctgctcaatgtcacttcattaaaggcggccttctataaactaccttgtataaaatattatttattttctctatcccggcattctaatttctcttatcctaattaatttttctttagcccttattttgatgagtattatgccgaatacaggcagccctcacttttcatggccagtgcaagattgcaaaaagactgtgcaacctgaaacccaggaaagcagtctccatagtcaatcagaaaaacaatgatcattctgtgacctttaccattttttgtcaaaatattagaaactctcacactctcagttacaaatgtagaggacaatgaaaatataatgaaataaatatttatttgtgcactacaattcaaagcattagaaacattgaagtcaatggcgtttcttgtaaatgtatccagatgaggttggaagagtgcttgacctttttgtatatttctaatatggagtgatatagtttggctctgtgtctccatccaaatctcatcttaaattgtaatctgcatgtgttgtgggaatgggacctaggtaggaggtgactgaatacatgggggcggacttcccccttgctgttcttgtgatagtgagttctcataagatctcagtgagttctcatgagatctggttttttgaaagtgtgtggcaagtcccccttcgctctctctctctctctccctcctgccaccatgtgaagaaggtgcctgcttccttttctccttccaccatggttgtaagtttcctgaggcctcccagtcatgcttcctgttaagcctgtggaactgtgagtccaattaaacctcttttattcataaaatatccagtttctggtagttctttatagcagtgtgagaatgggctaatacacggagcaagcatcgttctttcatttttatttattttattttttgagatggagtttcaccttattcccaggctggagtgcaatgtcgtgatcttggctcactgcaacccccgcctccagggttcaagtgattctcctgcctcagcctcctgagtagctgggattacaggcatgtaccaccacacccagctaattttgtatttttagtagagatggggtttctccatgttgatcagactagtcttgaactcccgacctcaggtgatccacctgtcttggcctcccaaagtgctgggattacaggcatgagccaccatgcctagccagcaagcatcatttctattataccttggtgtttgcctctttctaagtttggactagcttccaacatcttatcccttgaattttcaatattgtggaatcactccagaagatcctttcatgtgaagttttttgctggcatttcaacctttgggacatcttcagcccttttattaccactcctctcccatttgtggcagtttgcgtttactacctccctctggctgcctatctgaagttcctgcatcagggtctacattgccacagtcaactatttgtacttctagaattc

SEQ ID NO: 14710 - DNA, 1834 bp, Homo sapiens
actttgacagtcttctcatgctgcctctgccaccttctctgccagaagataccatttcaactttaacacagcatgatcgaaacatacaaccaaacttctccccgatctgcggccactggactgcccatcagcatgaaaatttttatgtatttacttactgtttttcttatcacccagatgattgggtcagcactttttgctgtgtatcttcatagaaggttggacaagatagaagatgaaaggaatcttcatgaagattttgtattcatgaaaacgatacagagatgcaacacaggagaaagatccttatccttactgaactgtgaggagattaaaagccagtttgaaggctttgtgaaggatataatgttaaacaaagaggagacgaagaaagaaaacagctttgaaatgcaaaaaggtgatcagaatcctcaaattgcggcacatgtcataagtgaggccagcagtaaaacaacatctgtgttacagtgggctgaaaaaggatactacaccatgagcaacaacttggtaaccctggaaaatgggaaacagctgaccgttaaaagacaaggactctattatatctatgcccaagtcaccttctgttccaatcgggaagcttcgagtcaagctccatttatagccagcctctgcctaaagtcccccggtagattcgagagaatcttactcagagctgcaaatacccacagttccgccaaaccttgcgggcaacaatccattcacttgggaggagtatttgaattgcaaccaggtgcttcggtgtttgtcaatgtgactgatccaagccaagtgagccatggcactggcttcacgtcctttggcttactcaaactctgaacagtgtcaccttgcaggctgtggtggagctgacgctgggagtcttcataatacagcacagcggttaagcccaccccctgttaactgcctatttataaccctaggatcctccttatggagaactatttattatacactccaaggcatgtagaactgtaataagtgaattacaggtcacatgaaaccaaaacgggccctgctccataagagcttatatatctgaagcagcaaccccactgatgcagacatccagagagtcctatgaaaagacaaggccattatgcacaggttgaattctgagtaaacagcagataacttgccaagttcagttttgtttctttgcgtgcagtgtctttccatggataatgcatttgatttatcagtgaagatgcagaagggaaatggggagcctcagctcacattcagttatggttgactctgggttcctatggccttgttggagggggccaggctctagaacgtctaacacagtggagaaccgaaaccccccccccccccccgccaccctctcggacagttattcattctctttcaatctctctctctccatctctctctttcagtctctctctctcaacctctttcttccaatctctctttctcaatctctctgtttccctttgtcagtctcttccctcccccagtctctcttctcaatccccctttctaacacacacacacacacacacacacacacacacacacacacacacacacacacagagtcaggccgttgctagtcagttctcttctttccaccctgtccctatctctaccactatagatgagggtgaggagtagggagtgcagccctgagcctgcccactcctcattacgaaatgactgtatttaaaggaaatctattgtatctacctgcagtctccattgtttccagagtgaacttgtaattatcttgttatttattttttgaataataaagacctcttaacattaa

SEQ ID NO: 14711 - DNA, 3071 bp, Homo sapiens
aatgaatccctgcggttggctgggggcagtgggtcccacactgcctaacttccctaaatgggcagcttcacttttagaaccccgggtccttccctggcaggcccaggtggcacatcctgtgtcgggtgggccctcaccttggatctccaggcctgacactgcccagctggatggaaccatggccccagccttcctgctgctgctgctgctgtggccacagggttgcgtctcaggcccctctgctgacagtgtatacacaaaagtgaggctccttgaaggggagactctgtctgtgcagtgctcctataagggctacaaaaaccgtgtggagggcaaggtttggtgcaaaatcaagaagaagaagtgtgagcctggctttgcccgagtctgggtgaaagggccccgctacttgctgcaggacgatgcccaggccaaggtggtcaacatcaccatggtggccctcaagctccaggactcaggccgatactggtgcatgcgcaacacctctgggatcctgtaccccttgatgggcttccagctggatgtgtctccagctccccaaactgagaggaacattcctttcacacatctggacaacatcctcaagggtggaactgtcacaactggccaagcccctacctcaggccctgatgccccttttaccactggtgtgatggtgttcaccccaggactcatcaccttgcctaggctcttagcctccaccagacctgcctccaagacaggctacagcttcactgctaccagcaccaccagccagggacccaggaggaccatggggtcccagacagtgaccgcgtctcccagcaatgccagggactcctctgctggcccagaatccatctccactaagtctggggacctcagcaccagatcgcccaccacagggctctgcctcaccagcagatctctcctcaacagactaccctccatgccctccatcaggcaccaggatgtttactccactgtgcttggggtggtgctgaccctcctggtgctgatgctgatcatggtctatgggttttggaagaagagacacatggcaagctacagcatgtgcagcgatccttctacacgtgacccacctggaagaccagagccctatgtggaagtctacttgatctgaggccacttaagcatggggtggggagcttctcccagagtggccccagggggttagaggaggggtgaagattggggccagtatcgatcttatgaagctggaggacttgtgcagtgctggactcacccaggacttcccaaacccagaggctgccatcctaagcagccccacagcccagtgttctccttgggggcaggaacctggggaggggcccagagcaaagggcatcagggagaaagtcccgaggaaatgtgaccagtggcttctgctcggagctgcagaccccagggctcttggtggaggcaggggaaccctgagagtgctgtttacagagaacctcagctcccgtctgcctcagaaaccctactgggctgagctgccctccccaccagggccgctgtgtcctctgcttccctccgttctgcttcagcttcccctaaggttagggaagaaagaatcgggctcacgaatgccagaggcagtgatgtcccatcctggaggagaggaaacagtgactaaaagctggggacccacagaggggttggcagcttctcttgtcgggacaggtgtcctttgctgggcctctggatggccctgccctgactggggctgctcctccctcctgtcctgggaccccgcagagcccacgctctcactgctgcctcctgctggccgctgcctccttagaaagctgtgaccaggcagctaagagcctctgggctgcagggtcagcctctcccaagactgaagtgcagaggctggacttggggctctctcccccagcttctacacctgggctccaagtctgagttcccacaggggacccagcagcctccaggaagtccataccctggggtggctgagaccttggctctgtatggaggctgctcaccccacagacactggtggggagaccatggctcagaggaagggtggagcaaccctactcctacccctcaggatagagagagaagacacacttgggacacagtgaagacagtaacttggaactgaccacggcctggaggactggcccaggcagggggacagggaaaatggagcccaagtagcctctggccagggacccaatgtcccgaggaatctgcctcccacccactgactcagggctcagactcagcctctattgtccagagcactggcttggcgtccagcaatgaaggctggagaatgcagcctggattcccctacacacacacacacacacacacacacacacacacacacacacacacacacacacaggtgtctactgacctggagtgactggaatagcacctggggataaatgtgacaactgtgcattgaaccctgggtcagggacgttccaatggccaagagagtgacacagccaggaccctggtggacagccagaggggccacttcaggatggatgtggggagagtggaagaggcagggagtaatcctgggggacagcagggaggaggcacttcttccctatgtccaggagagggcaatagagggaagactgaggctgaagaattgacggctctggacccaggacagacagacagacagacagacagacacgcacacacacccatctctgtctagcaagcagcctcctaagatagctgttctccctatcatgacggtgtagccaccatcctgttgtatactaggagagaacttaacccacctgggggaaaatagctccccaagagctggcaccagtaccactgatggccctgcttcctctgagtgagatgcccaggaggaggagccctagggaagaagtcagggacagggaccaggataccactctgtcactgtgtgaccctcagcaagtcactaacccttggcctcatttttcctgtcttgtgaaagaggacaataattcctacttctcaagattgttttcaagataaagtaacattagcattgtacaatg

SEQ ID NO: 14712 - DNA, 1154 bp, Homo sapiens
gacgccaaggcccctccggccagggccgggagccgggccggcctagccagttctgaaagccccatggccccagcaggcctctgagccccaccatgggcagcttgtactcggagtacctgaaccccaacaaggtccaggaacactataattataccaaggagacgctggaaacgcaggagacgacctcccgccaggtggcctcggccttcatcgtcatcctctgttgcgccattgtggtggaaaaccttctggtgctcattgcggtggcccgaaacagcaagttccactcggcaatgtacctgtttctgggcaacctggccgcctccgatctactggcaggcgtggccttcgtagccaataccttgctctctggctctgtcacgctgaggctgacgcctgtgcagtggtttgcccgggagggctctgccttcatcacgctctcggcctctgtcttcagcctcctggccatcgccattgagcgccacgtggccattgccaaggtcaagctgtatggcagcgacaagagctgccgcatgcttctgctcatcggggcctcgtggctcatctcgctggtcctcggtggcctgcccatccttggctggaactgcctgggccacctcgaggcctgctccactgtcctgcctctctacgccaagcattatgtgctgtgcgtggtgaccatcttctccatcatcctgttggccatcgtggccctgtacgtgcgcatctactgcgtggtccgctcaagccacgctgacatggccgccccgcagacgctagccctgctcaagacggtcaccatcgtgctaggcgtctttatcgtctgctggctgcccgccttcagcatcctccttctggactatgcctgtcccgtccactcctgcccgatcctctacaaagcccactactttttcgccgtctccaccctgaattccctgctcaaccccgtcatctacacgtggcgcagccgggacctgcggcgggaggtgcttcggccgctgcagtgctggcggccgggggtgggggtgcaaggacggaggcgggtcgggaccccgggccaccacctcctgccactccgcagctccagctccctggagaggggcatgcacatgcccacgtcacccacgtttctggagggcaacacggtggtctga

SEQ ID NO: 14713 - DNA, 4492 bp, Homo sapiens
gacgggtcaggagcgtagaggcggcggcaaaatggcggcgcctgaggagcgggatctaacccaggagcagacagagaagctgctgcagtttcaggatctcactggcatcgaatctatggatcagtgtcgccataccttggaacagcataactggaacatagaggctgctgtacaggacagattgaatgagcaagagggcgtacctagtgttttcaacccacctccatcacgacccctgcaggttaatacagctgaccacaggatctacagctatgttgtctcaagacctcaaccaagggggctgcttggatggggttattacttgataatgcttccattccggtttacctattacacgatacttgatatatttaggtttgctcttcgttttatacggcctgaccctcgcagccgggtcactgaccccgttggggacattgtttcatttatgcactcttttgaagagaaatatgggagggcacaccctgtcttctaccagggaacgtacagccaggcacttaacgatgccaaaagggagcttcgctttcttttggtttatcttcatggagatgatcaccaggactctgatgagttttgtcgcaacacactctgtgcacctgaagttatttcactaataaacactaggatgctcttctgggcatgctctacaaacaaacctgagggatacagggtctcacaggctttacgagagaacacctatccattcctggccatgattatgctgaaggatcgaaggatgactgtggtgggacggctagaaggcctcattcaacctgatgacctcattaaccaactgacatttatcatggatgctaaccagacttacctggtgtcagaacgcctagaaagggaagaaagaaaccagacccaagtgctgagacaacagcaggatgaggcctacctggcctctctcagagctgaccaggagaaagaaagaaagaaacgggaggagcgggagcgtaagcggcggaaggaggaggaggtgcaacagcaaaagttggcagaggagagacggcggcagaatttacaggaggaaaaggaaaggaagttggaatgcctgccccctgaaccttcccctgatgaccctgaaagtgtcaagatcatcttcaaattacctaatgattctcgagtagagagacgattccacttttcacagtctctaacagtaatccacgacttcttattctccttgaaggaaagcccagaaaagtttcagattgaagccaattttcccaggcgagtgctgccctgcatcccttcagaggagtggcccaatccccctacgctacaggaggccggactcagccacacagaagttctttttgttcaggacctaactgacgaatgacatttttttcttcctgtcccctcctaccccagtccctaaaagaaatggggaaaaaagaaaacaacagcaagtcagaaaaaaaaaacaagagagagaaattcatattattattattattataatacaatattttttttaaaagactgctgcatccttaggaaggatcagaaaccatgctgcccgtaagagtcacaacctgtgtgtgcgcgcaaggttagcaacaaacgtacccgcttggcaagcccacccttcctgtggcctctgtgcacgcaccttccagtgaacagagactcttcaccttcgacccatccattgtcccagctgggaaggggacattcccactagttctcattcattcttgcttttatgaaaaataaaagtgaaaaacctccatcaaccagctacttgcagcatctcctgaggacttgcttctcctgcctctggggaagagagggaagagaaagcacagagcagagaagcagagatgttccttgaactgcccacaagttttcaataacttttatttctgttttgtaatgaccaaaggaatgaggctgacataggtatatatatatatttttttcctttatttgataaagagccaattctttaaacccatgagtttatgccctgggctccttagcccacaatagtgtaataaaagtgccccgggctggtttgtgcttatttctgccattgtccctctcacgttcccagagaggtcattctttttggtccaactcttgctgtcctttcttaccacctgtgcaccccacttggagcagtgggaggaaatctgggtttgtggccccacaaaggctgtatatgtaaagatacacctatgtatgtggtggaactcacctttacacacaactgcagcttttccttggagtctgtaccaggtggtggttatggggtctgaaccaaaggatagcagctcttcattcctcttctgacatgtgcatgctgctccccccagccctgggctttcctgaattgccaagcctggtgcctttccaaaggactagcagggcctgtggtggagccagcagaaccacaggagagtgccctgcctgtctcagtggaagtgtattattgttttaaggatagaaccagaggccttgaagggagccaagacagaactcccagcctgtgtaatctattggaaggcacattttcatttctgatgcagccaccttctggaggcagcttttatcctttctctctattgctatgttgaagtaatagggttttttttaacctctggatgtctcgtctgtggttgagtttatggtaatgggtacatgggtcaggccatgtattaacagatgccagtgcgctctgacaagtattccaaagtgttctgtagctagactggtgcaggctcgttgtaccactgcaaccgactgacgttactgtagttcctagaatgctgtgagggcggggggttcagatcaacataaagcctaacttgctggagttgtagtctcaaggctttctctcttgcttaactaaaacctaaggaccactgtttttggtagcaattatatggttactatccactgcagtcctcagttgttggggtaaatcccacatggcagagtaaggcaccccacagaaattaacttggagagcctgagaaattcccagtggccttggcatagctgtctagaacaccatctctaggaaaatttaattctgtccctggccagctattgttcttccacttcgttttctgctgtcccaaggccagatgagtggaatcaccatctgactgctgtcaataaaatgtatctggcgtgaacagcaggataacccatgttctccacataaggataaccttacgtgaaaccttcctgctgacaaccatgcagaggaatttttccacttaagtcagagccttcctccccatctggaattcacagctgttccctggcagcacacaggagggtattaaggacctttgtgaggctaggtacactgtccacacctctttggggaagttacgattttttttttccatcataattcagtctcttcttattctacagtgtgcactttatgcctctcgccttttgataatagttgttcagtgaaggaagtcagctgccagaatattaagaagggtctccctttatgtcagtacaactgttagggcggccttcccatttactttaggtttcaagaggattcaccggaagcacatgccccggtctagtcccatttgaaacagttctgctttactgagaccctaggccggtctccttgctgaccctagcgctgctgcctaggtgccatttcctttcctcctcagtcaaatacaggctgcacattttgtcacttaatgccagtacaatctgtgttactcctaaggacttttgggattttgatgagacctgcgagggagaagacactgagaagccagtgatctgcaagcatttgctcttgtttccacatcacctctgggatatttcagctgttgtttccaaatggcaaatcatcaactaaaagcacttgtttcaagttttgttctgcactcccacgactgaagttgtagattgagctgaataaccatgggaagtgaccaagcaaagacactcgattggagtcagttgaatatttgtaccctcagtggagcccttctggtcttttcttccacttctgcagaatttcctctagcaaatacttctttctccttgcttgcctccaccatgatatttgaataagagatggccagaggataacacttgtctcttaaaaactaagctaaaaagaacctagaaccttcaattgagcagttgtgaaaattgctaatggtgccaaggccaagcaaagagtttcagaaaatgactgagaaggagcgataacccccagaatgcaaaatcaggggcatcattatccggtgcttgaacaaggagctccgctctacaactggtttttttaggacttgtgaggaacacagcaacggaaatccatccacaaaggatgcagtgccccaacttgtactgcgcctgaatagtcatgtgataatttactgaagaaatctagtgtactttaaatttttttcataaaagtttacattgtattgtaggttaacattaaatgttttatagcaaaaacttc

SEQ ID NO: 14714 - DNA, 4816 bp, Homo sapiens
cgtcttcccggtctcctttcccggccgcacagggtagattttcgttccgtcacccaggctggagtgcagtggtgtgaccttggcttgctgcaaccctttgcctcctgggttcaagtgattctcattgcctcagcctcctaagtagctgggattacaggttttataggatcacattgacaaaagtaccatggagttttatgagtcagcatattttattgttcttattccttcaatagttattacagtaattttcctcttcttctggcttttcatgaaagaaacattatatgatgaagttcttgcaaaacagaaaagagaacaaaagcttattcctaccaaaacagataaaaagaaagcagaaaagaaaaagaataaaaagaaagaaatccagaatggaaacctccatgaatccgactctgagagtgtacctcgagactttaaattatcagatgctttggcagtagaagatgatcaagttgcacctgttccattgaatgtcgttgaaacttcaagtagtgttagggaaagaaaaaagaaggaaaagaaacaaaagcctgtgcttgaagagcaggtcatcaaagaaagtgacgcatcaaagattcctggcaaaaaagtagaacctgtcccagttactaaacagcccacccctccctctgaagcagctgcctcgaagaagaaaccagggcagaagaagtctaaaaatggaagcgatgaccaggataaaaaggtggaaactctcatggtaccatcaaaaaggcaagaagcattgcccctccaccaagagactaaacaagaaagtggatcagggaagaagaaagcttcatcaaagaaacaaaagacagaaaatgtcttcgtagatgaaccccttattcatgcaactacttatattcctttgatggataatgctgactcaagtcctgtggtagataagagagaggttattgatttgcttaaacctgaccaagtagaagggatccagaaatctgggactaaaaaactgaagaccgaaactgacaaagaaaatgctgaagtgaagtttaaagattttcttctgtccttgaagactatgatgttttctgaagatgaggctctttgtgttgtagacttgctaaaggagaagtctggtgtaatacaagatgctttaaagaagtcaagtaagggagaattgactacgcttatacatcagcttcaagaaaaggacaagttactcgctgctgtgaaggaagatgctgctgctacaaaggatcggtgtaagcagttaacccaggaaatgatgacagagaaagaaagaagcaatgtggttataacaaggatgaaagatcgaattggaacattagaaaaggaacataatgtatttcaaaacaaaatacatgtcagttatcaagagactcaacagatgcagatgaagtttcagcaagttcgtgagcagatggaggcagagatagctcacttgaagcaggaaaatggtatactgagagatgcagtcagcaacactacaaatcaactggaaagcaagcagtctgcagaactaaataaactacgccaggattatgctaggttggtgaatgagctgactgagaaaacaggaaagctacagcaagaggaagtccaaaagaagaatgctgagcaagcagctactcagttgaaggttcaactacaagaagctgagagaaggtgggaagaagttcagagctacatcaggaagagaacagcggaacatgaggcagcacagcaagatttacagagtaaatttgtggccaaagaaaatgaagtacagagtctgcatagtaagcttacagataccttggtatcaaaacaacagttggagcaaagactaatgcagttaatggaatcagagcagaaaagggtgaacaaagaagagtctctacaaatgcaggttcaggatattttggagcagaatgaggctttgaaagctcaaattcagcagttccattcccagatagcagcccagacctccgcttcagttctagcagaagaattacataaagtgattgcagaaaaggataagcagataaaacagactgaagattctttagcaagtgaacgtgatcgtttaacaagtaaagaagaggaacttaaggatatacagaatatgaatttcttattaaaagctgaagtgcagaaattacaggccctggcaaatgagcaggctgctgctgcacatgaattggagaagatgcaacaaagtgtttatgttaaagatgataaaataagattgctggaagagcaactacaacatgaaatttcaaacaaaatggaagaatttaagattctaaatgaccaaaacaaagcattaaaatcagaagttcagaagctacagactcttgtttctgaacagcctaataaggatgttgtggaacaaatggaaaaatgcattcaagaaaaagatgagaagttaaagactgtggaagaattacttgaaactggacttattcaggtggcaactaaagaagaggagctgaatgcaataagaacagaaaattcatctctgacaaaagaagttcaagacttaaaagctaagcaaaatgatcaggtttcttttgcctctctagttgaagaacttaagaaagtgatccatgagaaagatggaaagatcaagtctgtagaagagcttctggaggcagaacttctcaaagttgctaacaaggagaaaactgttcaggatttgaaacaggaaataaaggctctaaaagaagaaataggaaatgtccagcttgaaaaggctcaacagttatctatcacttccaaagttcaggagcttcagaacttattaaaaggaaaagaggaacagatgaataccatgaaggctgttttggaagagaaagagaaagacctagccaatacagggaagtggttacaggatcttcaagaagaaaatgaatctttaaaagcacatgttcaggaagtagcacaacataacttgaaagaggcctcttctgcatcacagtttgaagaacttgagattgtgttgaaagaaaaggaaaatgaattgaagaggttagaagccatgctaaaagagagggagagtgatctttctagcaaaacacagctgttacaggatgtacaagatgaaaacaaattgtttaagtcccaaattgagcagcttaaacaacaaaactaccaacaggcatcttcttttccccctcatgaagaattattaaaagtaatttcagaaagagagaaagaaataagtggtctctggaatgagttagattctttgaaggatgcagttgaacaccagaggaagaaaaacaatgaccttcgggagaaaaactgggaagcaatggaagcattggcatcaactgaaaaaatgctgcaggacaaagtgaacaagacttccaaggaaaggcagcaacaggtggaagctgttgagttggaggctaaagaagttctcaaaaaattatttccaaaggtgtctgtcccttctaatttgagttatggtgaatggttgcatggatttgaaaaaaaggcaaaagaatgtatggctggaacttcagggtcagaggaggttaaggttctagagcacaagttgaaagaagctgatgaaatgcacacattgttacagctagagtgtgaaaaatacaaatccgtccttgcagaaacagaaggaattttacagaagctacagagaagtgttgagcaagaagaaaataaatggaaagttaaggtcgatgaatcacacaagactattaaacagatgcagtcatcatttacatcttcagaacaagagctagagcgattaagaagcgaaaataaggatattgaaaatctgagaagagaacgagaacatttggaaatggaactagaaaaggcagagatggaacgatctacctatgttacagaagtcagagagctgaaagatctgttgactgaattgcagaaaaaacttgatgattcatattctgaagcagtaagacagaatgaagagctaaatttgttgaaggcacagttaaatgaaacactcacaaaacttagaactgaacaaaatgaaagacagaaggtagctggtgatttgcataaggctcaacagtcactggagcttatccagtcaaaaatagtaaaagctgctggagacactactgttattgaaaatagtgatgtttccccagaaacggagtcttctgagaaggagacaatgtctgtaagtctaaatcagactgtaacacagttacagcagttgcttcaggcggtaaaccaacagctcacaaaggagaaagagcactaccaggtgttagagtgatcatcctctggcctaccttgacacatgctctccttcaaaatgctaattcagagtgaagtaattgggaaactgttcatttgaggataaaaaaggcattgtattatattttgccaaattaaagccttatttatgttttcaccctttctactttgtcagaaacactgaacagagttttgtcttttctaatccttgttagactactgatttaaagaaggaaaaaaaaaagccaactctgtagacaccttcagagtttagttttataataaaaactgtttgaataattagacctttacattcctgaagataaacatgtaatcttttatcttattttgctcaataaaattgttcagaagatcaaagtggtaaagacaatgtaaaatttaacattttaatactgatgttgtacactgttttacttaacattttgggaagtaactgcctctgacttcaactcaagaaaacacttttttgttgctaatgtaatcggtttttgtaatggcgtcagcaaataaaaggatgcttattattcaaaaaaaaaaaaaaaaaaaaaaaaaa

SEQ ID NO: 14715 - DNA, 3309 bp, Homo sapiens
ggcggagagaataaagcagaaagacaggaagaggaggtggagttctacagttagtgtggttttagtttttcctaagaagtggcgtggtttggggctttatatccgggaggagcatatgtacgcaaatcctggggcgtttgcaaacccggatccggggcgtctggccccatgcccggccgggcgtttgagggctactgccacgcagcgtttctggagcctgccggctggtgccctggtggcctttatctctgtccccctttgtcctctttatctcaggctctccaggaggccggggggcccactccgcctatcgctcccctcggctacgctgccacttcaatgccccgcaggtcgcgagctgctgttctttcgaaggcgtcggagaaccaggggcgtcccgcgccacctctgactcggagcagcgccgagcactgacgctcccgcccttgggcaaggacgccagtgcgcccgcgcgcgtccctctgcgcggcagcccgtcgcgggccctcaaggggaagcccaggccaggatggccccgggtcgcgcggtggccgggctcctgttgctggcggccgccggcctcggaggagtggcggaggggccagggctagccttcagcgaggatgtgctgagcgtgttcggcgcgaatctgagcctgtcggcggcgcagctccagcacttgctggagcagatgggagccgcctcccgcgtgggcgtcccggagcctggccagctgcacttcaaccagtgtttaactgctgaagagatcttttcccttcatggcttttcaaatgctacccaaataaccagctccaaattctctgtcatctgtccagcagtcttacagcaattgaactttcacccatgtgaggatcggcccaagcacaaaacaagaccaagtcattcagaagtttggggatatggattcctgtcagtgacgattattaatctggcatctctcctcggattgattttgactccactgataaagaaatcttatttcccaaagattttgaccttttttgtggggctggctattgggactcttttttcaaatgcaattttccaacttattccagaggcatttggatttgatcccaaagtcgacagttatgttgagaaggcagttgctgtgtttggtggattttacctacttttcttttttgaaagaatgctaaagatgttattaaagacatatggtcagaatggtcatacccactttggaaatgataactttggtcctcaagaaaaaactcatcaacctaaagcattacctgccatcaatggtgtgacatgctatgcaaatcctgctgtcacagaagctaatggacatatccattttgataatgtcagtgtggtatctctacaggatggaaaaaaagagccaagttcatgtacctgtttgaaggggcccaaactgtcagaaatagggacgattgcctggatgataacgctctgcgatgccctccacaatttcatcgatggcctggcgattggggcttcctgcaccttgtctctccttcagggactcagtacttccatagcaatcctatgtgaggagtttccccacgagttaggagactttgtgatcctactcaatgcagggatgagcactcgacaagccttgctattcaacttcctttctgcatgttcctgctatgttgggctagcttttggcattttggtgggcaacaatttcgctccaaatattatatttgcacttgctggaggcatgttcctctatatttctctggcagatatgtttccagagatgaatgatatgctgagagaaaaggtaactggaagaaaaaccgatttcaccttcttcatgattcagaatgctggaatgttaactggattcacagccattctactcattaccttgtatgcaggagaaatcgaattggagtaatagaaaatggaagatggtgttgttaataaaggcatttaatagataaaaacatctccaaaaaggattttgaagctgatcctatttagttaaaaagataattttgctttcaactgtaggtccagaaaactaattattggcatcagtctgtgaaatagtccattatttgttgttaaaaatgcttcaaaaggttttcagtgtcagtctgagatgcctggtatataggagcctttgggaaatacctatttttcagtattccatgcatattagatatcaccatgaagcaagagacatgcattctataatcatgtagacactcagactcaggggaaaatacaagttatatcctgaaagcctttaaaactctatggtaggatcaaagattcaaatggtttcagagaggttttatttcaattaatttgttctagtgctttcaagagcaagtacatcaaaatgtagaaggtaaaatgtatgcaacactaatataaattattccaagtctttaaggagccaaagaaaaaaaagatttctcacagctttttgttctgttttgtatttcaattaggaacttgcagtattattttgaaaaccattctaaaataataggagttaggaaataaataaagttttgctagccctgctaagttcaggcttagaggcttatcgctaagtataaacttcaccagattccacgaaaagctggatagctttttttctgacttatgttgtggttgcacccctcacaaatggcagaacagtatgtaaagctggtaacacctcggtttcagtgcaccatgtgtttgctttgtgaaggtgaagaatatgttggtttagagaaagaaattggatgtaattttatgcaatttacttttaaagacaaacataactatttagcagagaatattttaataaatgcaaaacaacagctggactgctgtacatcaaggacagattaactggaaaacatatgttccttatgtgtgatcgagagccattcagaaaagacttcctttgtgttcagcctatacttttccatatggtataccttgaaaaaaattagcacaccatggttatttttctaccttttataaaagacagagcctgtttactcatttagaagatagagaaaattggtctaaaattgaacatcctagattcacactcccaagtcacttaaggtgatttgatggtgaggaaaatgattgacaaagcccaacaatgatctcaggaattacattttccaacagaccaaaaaatgttttcatgtagcagcaatgcagatttggtgaatatttaatatatattttagtatgtatttcactttatgactgacaattaaaaaatattgtttggccaaatagtaaacacccttttgaaaccatgaaaaaaaaaaaaaaaaa

SEQ ID NO: 14716 - DNA, 3745 bp, Homo sapiens
cgcaaagcaagtgggcacaaggagtatggttctaacgtgattggggtcatgaagacgttgctgttggacttggctttgtggtcactgctcttccagcccgggtggctgtcctttagttcccaggtgagtcagaactgccacaatggcagctatgaaatcagcgtcctgatgatgggcaactcagcctttgcagagcccctgaaaaacttggaagatgcggtgaatgaggggctggaaatagtgagaggacgtctgcaaaatgctggcctaaatgtgactgtgaacgctactttcatgtattcggatggtctgattcataactcaggcgactgccggagtagcacctgtgaaggcctcgacctactcaggaaaatttcaaatgcacaacggatgggctgtgtcctcatagggccctcatgtacatactccaccttccagatgtaccttgacacagaattgagctaccccatgatctcagctggaagttttggattgtcatgtgactataaagaaaccttaaccaggctgatgtctccagctagaaagttgatgtacttcttggttaacttttggaaaaccaacgatctgcccttcaaaacttattcctggagcacttcgtatgtttacaagaatggtacagaaactgaggactgtttctggtaccttaatgctctggaggctagcgtttcctatttctcccacgaactcggctttaaggtggtgttaagacaagataaggagtttcaggatatcttaatggaccacaacaggaaaagcaatgtgattattatgtgtggtggtccagagttcctctacaagctgaagggtgaccgagcagtggctgaagacattgtcattattctagtggatcttttcaatgaccagtacttggaggacaatgtcacagcccctgactatatgaaaaatgtccttgttctgacgctgtctcctgggaattcccttctaaatagctctttctccaggaatctatcaccaacaaaacgagactttgctcttgcctatttgaatggaatcctgctctttggacatatgctgaagatatttcttgaaaatggagaaaatattaccacccccaaatttgctcatgctttcaggaatctcacttttgaagggtatgacggtccagtgaccttggatgactggggggatgttgacagtaccatggtgcttctgtatacctctgtggacaccaagaaatacaaggttcttttgacctatgatacccacgtaaataagacctatcctgtggatatgagccccacattcacttggaagaactctaaacttcctaatgatattacaggccggggccctcagatcctgatgattgcagtcttcaccctcactggagctgtggtgctgctcctgctcgtcgctctcctgatgctcagaaaatatagaaaagattatgaacttcgtcagaaaaaatggtcccacattcctcctgaaaatatctttcctctggagaccaatgagaccaatcatgttagcctcaagatcgatgatgacaaaagacgagatacaatccagagactacgacagtgcaaatacgacaaaaagcgagtgattctcaaagatctcaagcacaatgatggtaatttcactgaaaaacagaagatagaattgaacaagttgcttcagattgactattacaacctgaccaagttctacggcacagtgaaacttgataccatgatcttcggggtgatagaatactgtgagagaggatccctccgggaagttttaaatgacacaatttcctaccctgatggcacattcatggattgggagtttaagatctctgtcttgtatgacattgctaagggaatgtcatatctgcactccagtaagacagaagtccatggtcgtctgaaatctaccaactgcgtagtggacagtagaatggtggtgaagatcactgattttggctgcaattccattttacctccaaaaaaggacctgtggacagctccagagcacctccgccaagccaacatctctcagaaaggagatgtgtacagctatgggatcatcgcacaggagatcattctgcggaaagaaaccttctacactttgagctgtcgggaccggaatgagaagattttcagagtggaaaattccaatggaatgaaacccttccgcccagatttattcttggaaacagcagaggaaaaagagctagaagtgtacctacttgtaaaaaactgttgggaggaagatccagaaaagagaccagatttcaaaaaaattgagactacacttgccaagatatttggactttttcatgaccaaaaaaatgaaagctatatggataccttgatccgacgtctacagctatattctcgaaacctggaacatctggtagaggaaaggacacagctgtacaaggcagagagggacagggctgacagacttaactttatgttgcttccaaggctagtggtaaagtctctgaaggagaaaggctttgtggagccggaactatatgaggaagttacaatctacttcagtgacattgtaggtttcactactatctgcaaatacagcacccccatggaagtggtggacatgcttaatgacatctataagagttttgaccacattgttgatcatcatgatgtctacaaggtggaaaccatcggtgatgcgtacatggtggctagtggtttgcctaagagaaatggcaatcggcatgcaatagacattgccaagatggccttggaaatcctcagcttcatggggacctttgagctggagcatcttcctggcctcccaatatggattcgcattggagttcactctggtccctgtgctgctggagttgtgggaatcaagatgcctcgttattgtctatttggagatacggtcaacacagcctctaggatggaatccactggcctccctttgagaattcacgtgagtggctccaccatagccatcctgaagagaactgagtgccagttcctttatgaagtgagaggagaaacatacttaaagggaagaggaaatgagactacctactggctgactgggatgaaggaccagaaattcaacctgccaacccctcctactgtggagaatcaacagcgtttgcaagcagaattttcagacatgattgccaactctttacagaaaagacaggcagcagggataagaagccaaaaacccagacgggtagccagctataaaaaaggcactctggaatacttgcagctgaataccacagacaaggagagcacctatttttaaacctaaatgaggtataaggactcacacaaattaaaatacagctgcactgaggcagcgacctcaagtgtcctgaaagcttacattttcctgagacctcaatgaagcagaaatgtacttaggcttggctgccctgtctggaacatggactttcttgcatgaatcagatgtgtgttctcagtgaaataactaccttccactctggaaccttattccagcagttgttccagggagcttctacctggaaaagaaaagaaatgaatagactatctagaacttgagaagattttattcttatttcatttattttttgtttgtttatttttatcgtttttgtttactggctttccttctgtattcataagattttttaaattgtcataattatattttaaatacccatcttcattaaagtatatttaactcataatttttgcagaaaatatgctatatattaggcaagaataaaagctaaagg

SEQ ID NO: 14717 - DNA, 1977 bp, Homo sapiens
cactccagtgtggcatcatgtggcagctgctcctcccaactgctctgctacttctagtttcagctggcatgcggactgaagatctcccaaaggctgtggtgttcctggagcctcaatggtacagggtgctcgagaaggacagtgtgactctgaagtgccagggagcctactcccctgaggacaattccacacagtggtttcacaatgagaacctcatctcaagccaggcctcgagctacttcattgacgctgccacagtcgacgacagtggagagtacaggtgccagacaaacctctccaccctcagtgacccggtgcagctagaagtccatgtcggctggctgttgctccaggcccctcggtgggtgttcaaggaggaagaccctattcacctgaggtgtcacagctggaagaacactgctctgcataaggtcacatatttacagaatggcaaagacaggaagtattttcatcataattctgacttccacattccaaaagccacactcaaagatagcggctcctacttctgcagggggcttgttgggagtaaaaatgtgtcttcagagactgtgaacatcaccatcactcaaggtttggcagtgtcaaccatctcatcattctctccacctgggtaccaagtctctttctgcttggtgatggtactcctttttgcagtggacacaggactatatttctctgtgaagacaaacatttgaagctcaacaagagactggaaggaccataaacttaaatggagaaaggaccctcaagacaaatgacccccatcccatgggagtaataagagcagtggcagcagcatctctgaacatttctctggatttgcaaccccatcatcctcaggcctctctacaagcagcaggaaacatagaactcagagccagatcctttatccaactctcgatttttccttggtctccagtggaagggaaaagcccatgatcttcaagcagggaagccccagtgagtagctgcattcctagaaattgaagtttcagagctacacaaacactttttctgtcccaaccattccctcacagtaaaacaacaatacaggctagggatggtaatcctttaaacatacaaaaattgctcgtattataaattacccagtttagaggggaaaaaagaaaataattattcctaaacaaatggataagtagaattaatgattgaggcaggaccctacagagtgtgggaactgctggggatctagagaattcagtgggaccaatgaaagcatggctgagaaatagcagggtagtccaggatagtctaagggaggtgttcccatctgagcccagagataagggtgtcttcctagaacattagccgtagtggaattaacaggaaatcatgagggtgacgtagaattgagtcttccaggggactctatcagaactggaccatttccaagtatataacgatgagccctctaatgctaggagtagcaaatggtcctaggaaggggactgaggattggggtgggggtggggtggaaaagaaagtacagaacaaaccctgtgtcactgtcccaagttaagctaagtgaacagaactatctcagcatcagaatgagaatgagaaagcctgagaagaaagaaccaaccacaagcacacaggaaggaaagcgcaggaggtgaaaatgctttcttggccagggtagtaagaattagaggttaatgcagggactgtaaaaccaccttttctgcttcaatgtctagttcctgtatagctttgttcattgcatttattaaacaaatgttgtataaccaatactaaatgtactactgagcttcactgagttacgctgtgaaactttcaaatccttcttcagtcagttccaatgaggtggggatggagaagacaattgttgcttatgaaaaaaagctttagctgtctcctgttttgtaagctttcagtgcaacatttcttggttccaataaagcattttac

SEQ ID NO: 14718 - DNA, 6028 bp, Homo sapiens
ggtgtggacgttgtctaaatttcggtagccatggcacaagaatataagaaagcatgggattatggcaaccacagaatctcagtagtacaagttccattcagttttttctgaaagaaagccctctgttaaagtgaagcaaagaaactgttgtggattataacgtttagaagttccaatttttcagtgctttacaaataaagcatcatttaaccttttaaatgaaaaagattaagatctcatgcaactgttgtattttctggaagccattctccaaaagggaagtgcacatttaaaacacagatatgatggtccttgctgcagggatttaagtctacttgcttttacatcatgaccagcttgaaacggtcacagacagaaaggcctcttgccactgacagggcctctgttgttggcacagacggcacccccaaagtccacactgatgatttctacatgcggcgcttccggtcccaaaatggcagcttaggatcatcagttatggctcctgtaggacccccccgaagtgaaggttctcaccatataacctcaacccccggagtcccaaaaatgggggtaagggcaaggattgcagattggcccccaagaaaggaaaacataaaagaatctagccgttcaagccaggaaatagaaacctcaagttgccttgatagcctgtcctccaaaagcagtcctgtgagtcagggaagttctgttagcctcaattccaatgactcagccatgctgaaaagcatacagaacacgctgaaaaacaagacaagaccgtcggagaacatggactccagatttctcatgcctgaagcctaccccagctcccccagaaaagctcttcgcagaatacgccagcgaagcaacagtgatatcaccataagtgaacttgatgtggatagctttgatgaatgtatctcacctacatacaagactggaccatcactgcacagggaatatggtagcacatcttcaattgataaacagggaacatctggagaaagcttttttgatttgttaaagggctacaaagatgacaaatctgatcgaggtccaactccaaccaagctcagtgactttctcattactggtggtggcaagggttctggtttctctttggatgtaatagacgggcctatctcacagagagagaacctcaggctttttaaggaaagggaaaaaccactcaagcgacgttcaaaatctgaaactggagactcctctatttttcgtaaattgcgcaatgccaaaggtgaagaacttgggaagtcatcagatcttgaagataaccgatcagaagactctgtcaggccctggacatgtccaaagtgctttgcccactatgatgtccagagtatattatttgatttgaatgaggcaattatgaacaggcacaatgttattaagaggagaaacaccaccactggagcttccgcagctgccgtggcatccttggtctctggacctctgtctcattcagccagttttagctccccaatgggcagcacagaggacctgaattccaaaggaagcctcagcatggaccagggagatgataaaagcaatgagcttgtaatgagctgtccatattttcggaatgagataggtggagaaggggagaggaaaatcagcctttcaaaatcaaattctggctcctttagtggatgtgaaagtgcctcctttgagtctacccttagttcccattgcacaaatgcaggagtggcagtacttgaagtgcccaaggagaacttggtgttgcacctagatagagtgaaaagatacatcgtggaacacgtagatctgggtgcatactattatagaaaatttttctaccagaaggaacactggaactattttggggctgatgagaatcttggtccagtggctgtgagcattcgaagggaaaaaccagatgaaatgaaagaaaatggatctccgtacaactaccgaataatttttagaactagtgagctcatgacactgagaggttcggtcctggaggacgccattccgtcgacagccaagcactcgacagccagaggcctgcctctcaaagaagtgctggagcacgtggttcctgagctcaatgtccagtgcctgcggttggccttcaacacacccaaggtcacagagcagctcatgaaactggatgaacaagggctgaactaccagcagaaagtaggcatcatgtactgcaaagctggacagagcactgaagaagagatgtacaacaatgagtcagctggcccagcctttgaagaattccttcaactattgggagagcgagttcggctcaaaggatttgagaagtatcgagcacagcttgataccaaaactgactccactggaacccattctctgtacacaacatacaaagattatgaaattatgttccatgtttctaccatgctgccatacacacccaacaacaaacaacagctcctgaggaagcggcacattggaaatgatatcgtaacaattgttttccaagagcctggagcacagccattcagcccaaaaaacatccgatcccacttccagcacgttttcgtcatcgtcagggtgcacaatccgtgctctgacagtgtctgttatagtgtggctgttaccaggtccagagatgtgccttcctttgggcctcccattcctaaaggggtcactttccctaagtcaaatgtgttcagggacttccttttggcgaaagtgattaatgcagaaaatgctgctcataaatcggagaagtttcgggccatggcaactcggacccgccaggaatacctgaaagatctggcagaaaagaatgtcaccaacacccctatcgacccttctggcaagtttccgttcatctctctggcttccaagaagaaggaaaagtctaagccatatccaggagccgagctcagcagcatgggggccattgtatgggcagtccgggctgaagactacaacaaggccatggaactagactgccttttagggatctccaatgagttcattgtgctcattgaacaggaaacaaagagcgtggtcttcaattgttcctgtagagatgtgatagggtggacttcaactgacaccagcctcaaaatcttctatgaacgaggagaatgtgtttcagtgggtagttttattaacattgaggagatcaaagagattgtcaaaaggttgcagtttgtttcaaaaggctgtgaatcggtggagatgactctgcgaagaaatgggctaggacagcttggcttccatgtcaactatgagggcattgtggcggatgtggagccctacggttatgcctggcaggcagggctgaggcagggcagtcgcctggtggagatctgcaaggtggcggtagccactctgagccatgagcagatgatcgacctcctgagaacatctgtcacggtgaaggttgtcatcattcccccgcatgatgactgcaccccgcggaggagttgctctgaaacctaccgcatgccagtgatggagtacaaaatgaatgaaggtgtttcatacgaattcaagtttcccttccgaaataataacaagtggcagaggaacgccagcaaggggcctcattcacctcaagtcccgtcccaggtgcagagtcccatgacctcgcggctgaatgctggaaaaggagatgggaagatgcctcctccagaaagagccgccaacatccctcgaagcatctccagtgacgggcgcccactagagaggcggctgtctcctggttcggacatctatgtgacggtctcatccatggctttagcaagatcccagtgtcggaactctcctagcaacttgtcttcatccagtgatactggttctgtggggggcacttacaggcagaagtccatgcccgaagggtttggagtgagccgtagatccccagcctccattgacaggcagaacacccagtcagatattggtggcagcggaaaatccacgcctagctggcaaagaagtgaggatagcattgctgaccagatggcttacagttatagaggacctcaggatttcaattcttttgtcctcgagcagcatgaatatacagagccaacatgccatctcccagcagtatcaaaggtactgccagctttccgagagagccccagtgggagattaatgcggcaggatccagtggttcatttgtctccaaacaaacaagggcattctgatagccactactcgagccactccagtagcaatactctctccagcaatgcgtcaagtgcccatagtgatgagaagtggtacgatggggaccgcacagaatccgaactcaacagctataactatctgcaaggcacctctgctgacagtggcattgacaccacctcttatggccccagccacggcagcacagcctcgctgggggctgccacatcgtcacctcgctcagggccaggcaaggagaaagtggcacccctatggcacagctccagtgaagtaatctccatggcagatcggactttggagacagagagccacggcctggaccggaaaacagagtcttccctgagcttagacatacacagcaagagccaagccggctcgacccctctgacaagggagaacagcaccttcagtataaacgatgctgcttcccacacaagtaccatgagctcccgacactctgccagcccagtggttttcaccagtgcccggagttcacctaaagaagagcttcatccagctgccccctcacagctcgcaccatccttctcctcctcttcctcctcctcctctggtcctaggagtttttaccctcgccagggcgctactagcaagtacctgattggatggaaaaaacccgaaggaaccataaactccgtgggatttatggacacgagaaagcgtcatcagagcgatggcaatgaaatagcccacaccaggctgcgtgcctcaaccagagacctccgggcatctcctaagccaacctccaagtccaccattgaagaagatctaaagaaactaattgatcttgaaagcccaactcctgaatcacagaagagttttaagttccacgcactctcctctcctcagtctcctttccccagcacccccacctcacggcgggccttgcacagaacactgtcggacgagagcatttacaatagccagagggagcactttttcacctccagggcgtcacttctggaccaagccctgcccaacgacgtcctcttcagtagcacgtacccttctctccccaagtcgctcccgttgaggaggccttcttacaccttaggaatgaaatcgctgcatggagagttctcagcctcggacagctccctcactgacatccaggagacccgcaggcagcctatgcccgaccctggcctgatgcccctgcctgacactgctgcagacttggattggtccaacctggtagatgctgccaaagcctatgaggtccagagagcctcattttttgctgctagtgatgaaaaccatcgccccttgagtgctgcatccaacagtgatcagctggaggaccaggctctggcccagatgaagccttacagcagcagtaaagactcctctcccactctggcttctaaagtggaccagctggaaggtatgctgaagatgcttcgggaagatttgaagaaggaaaaagaagacaaagctcaccttcaggcggaggtgcagcacctgcgagaggacaacctgaggctacaggaggagtcccagaacgcctcggacaagctgaagaagttcacagaatgggtcttcaacaccatagacatgagctagggaaggctgaggaggacaggagaagggcccagacactccctccagtgagtgtcctgcagcccttattccctccatagaaagcatcctcagagcaccttccctggcttcctactctgccccctttcggggagtgcacaacacaatagttgcagatcaacaatcatcacctgccttttgtagaaaagaaaaacaaaaaaagtaaataaaaattttaaacagtaaaataaaagtttaactgctaaaaaaaaaaaaaaaaaaaaaaaaa

SEQ ID NO: 14719 - DNA, 5947 bp, Homo sapiens
cagtgagtgactccctgaagcgctaggactttggggttaggagataagagttggggaggatctttgaagagttgaggatatggctgttgggaacctcccttgacctcctcctaccccccccactccaagttctctcttcctgtcccacactctgcctctgttagaaataggagacttctctctgctaaacctactggcaacgcccaactctttttttccttctcttctctctcttttcctaggtctgcagccaccccagctcatacctctctgcctccccgctctcaaggagggtctgccgcatgtgatgaaagtgtctactctcagggaaagctcagccatggcttccccactgccccgggagatggaggaggagctggtgcctactggctctgagccaggtgacactcgggccaaaccccctgtcaagcccaaaccccgggccctgcctgccaagccagccctgcctgccaaacccagcctgctggtgcctgttgggcctcggcctccccggggtcccctggctgagttgccttctgccaggaagatgaacatgccggcaggaccccagccctatggtggcagcaagcgcccccttccctttgcaccaaggcctgcggttgaggcctccactggaggggaagccacccaagagactgggaaagaggaggctgggaaagaggagccaccccctttgacacccccagctcgatgtgcagccccagggggtgtacggaaggcccctgcccctttccgcccagcctcagagcgcttcgcggccaccacggtggaagagatcctggccaagatggagcagcctcggaaggaggtccttgccagccccgaccgcctgtggggttcccgcctcacctttaaccacgatggcagctcgcgatatggccccaggacctatggcacgaccactgctcccagggatgaggatggcagcaccctcttcaggggatggtcccaggaggggccagtaaagtctccagcagagtgccgggaagagcacagcaagacccctgaggagaggagccttccttccgacctggccttcaacggggacctggctaaggcagccagctcggagctacctgctgatatttccaagccctggattccctcaagtccagccccctcctcagagaatggaggccctgccagcccaggcctccccgcagaagcctcaggctcaggccctggctctccccatcttcacccgcctgataagagttctccctgccactcacagcttctggaagcccagagtcctgaagcttcccaggcttctccctgccccgctgtgactccatcagctccaagtgcagccctgcctgacgagggctcccgccacacccccagcccggggctccctgccgagggggctccagaggcccccagacccagcagcccaccccctgaggtcttggagccccatagcctggatcagccccctgccacctcatcccggcccctgatcgaggtgggtgagttgctggatctcactcggacgtttccatctggcggggaggaggaggccaagggtgacgcacacctccgccccaccagcctggttcagcgccgattctctgaaggtgtgctccagtcacccagtcaggaccaggagaagctggggggctcgctggctgccctgccccaaggccaggggagccagttggccctggatcgtccctttggggcagagtccaactggagcttatcacagtccttcgaatggaccttccccacgaggccctcgggtctgggcgtgtggcggctggactccccgcctccctcccccatcactgaagccagtgaggccgccgaggctgctgaggctggcaacttggccgtttccagcagggaagaaggagtgtctcagcaggggcaaggggctgggtcagctccaagtgggtcaggaagttcctgggtgcagggggacgatccaagcatgtccctcacccagaagggcgatggggagagtcaacctcaattcccagctgttccccttgagcccctgcctacaactgagggcacacctggattacctttgcagcaggcagaggagagatacgagtcgcaggagcccttggctggacaggagtcccctctctccctggctaccagggaggcagccttgcccatcctggagccagtcctggggcaggagcagccagcagcccctgaccagccctgtgttctctttgctgatgcccctgagcctggacaggcactgcctgttgaggaggaggccgtgaccctagcccgggctgagaccacccaagccaggacagaggctcaagacttgtgtagggcatcccccgagcctccaggccctgaaagcagctcccgctggctggacgacctcctggcttcaccaccacccagtggtggcggtgcaaggcggggagctggagctgagctgaaggacacacagtccccaagtacctgctctgagggactccttggctggtcccagaaagatctgcagagtgaatttgggatcacaggagacccacagcccagcagtttcagtccttccagctggtgtcaaggtgcttctcaggactatggccttgggggtgcaagccctagaggagacccaggtctcggagagagggactggaccagcaagtatgggcaaggagcaggggaagggagcaccagggagtgggccagcaggtgtggcatcggccaggaggagatggaggccagcagcagccaagaccagagtaaagtgtctgccccaggggtgctcacagcccaggaccgggtagttggaaagccagcccagcttggcactcagcggagccaggaggcagatgttcaggactgggagttcagaaagagggattcccagggcacttactccagccgggatgcagaactccaggaccaggaattcggaaagagagattcactgggtacctacagtagtcgagatgtaagccttggggactgggaatttgggaagagagattctctgggtgcttatgccagccaagatgccaacgagcagggccaagatttggggaagagggaccaccatggtaggtacagcagccaggatgccgatgagcaggactgggagtttcagaagagagatgtgtcactcggcacctatggcagccgggctgcggagccacaggaacaggagtttgggaagagcgcttggataagggactacagcagtggtggcagctccaggacccttgacgcccaggacagaagctttggaacgagacccctgagctctgggttcagccccgaggaagcccagcaacaggatgaggaatttgagaagaagattccaagtgtggaagacagccttggagagggcagcagggatgctggccggccaggagagagaggatccgggggcttgttcagtcctagcactgcccacgtgccggatggggcactcgggcagagagaccagagcagctggcaaaacagtgatgctagccaggaggtgggagggcatcaggagagacagcaggcaggggctcagggccctggcagtgctgacctggaagatggggagatgggaaagcgaggctgggtcggtgagtttagcctcagtgttggcccccagcgagaggcagcatttagcccagggcagcaggactggagccgggacttctgcatcgaggccagtgagaggagctatcagtttggcatcattggcaacgacagagtgagtggtgctggctttagcccttctagcaagatggaaggtggtcactttgtgcctcctgggaagaccacagctggctcggtggactggactgaccagctgggtctcaggaacttggaagtgtccagctgtgtgggttctgggggctcgagcgaggccagggagagtgccgtgggacagatgggctggtcaggtggcctgagcttgagagacatgaacctgaccggctgtttggaaagtggagggtctgaagagccggggggaatcggagttggggagaaggactggacttctgatgttaatgtgaagagcaaagatttggctgaggtcggggagggaggaggccacagccaggccagagagagtggcgtggggcagactgactggtcaggtgtggaggccggagagttccttaaatcaagggagcgtggagttggacaggcagactggacacctgaccttgggctgagaaacatggccccaggggcagtctgcagtcctggagagtccaaagagcttggggtgggccagatggactggggtaacaatctgggcctgagggatttggaggtgacctgtgacccagactctggaggttctcaggggctacggggatgtggagtggggcagatggactggacccaggacttggcgccccagaatgtggagctctttggggctccaagtgaagccagggagcatggggtgggcggggtgagccagtgcccagagcccggcctgaggcacaatggcagcttgtctcctggcctggaggccagagaccccttggaggccagggagctgggggttggtgagacaagtgggccagagacccagggtgaagattactcctcgtcttccttggagccacaccctgcagaccctggaatggagacaggagaagccctcagcttcggagcaagccctggcaggtgcccggcccgccccccacccttcggctcccagggcctgctggaggagatgctggcagccagcagctccaaggcggtggctcggagggagtcagcggcctcgggccttgggggcctgttggaggaggaaggagccggggcaggtgctgcccaagaggaggtgctggagcctggcagggactctccaccctcctggaggccgcagcctgatggtgaggccagccagacagaagacgtggatggcacctggggctcttcagcagccaggtggagcgatcaggggccagcacagacttctcggcgaccctcccaaggccctcctgccagatcccccagtcaggacttctccttcattgaggacaccgagatcctcgacagtgccatgtatcggagccgtgccaacttggggcgcaagcgtgggcaccgggccccggtcattcggcctgggggtaccttgggcctgtcggaggcagcagactcggatgcacacctgttccaggactctacagagccacgggcatctcgggtgccatcttcagatgaagaggtagtggaggaacctcagagccgccggacacggatgtcgttgggcaccaaggggctgaaagtcaacctctttcctggcctgagcccctcagccctgaaggccaagctgcgcccccggaatcgctcagctgaggagggagagctggctgagagcaagtcgagccagaaggagtccgcggtccagcgttcgaaatcctgcaaggtcccaggactgggaaagcccctcacgttacctcccaagccagagaaatcctcagggtcagaaggatcgtcgcccaactggcttcaagccctgaaactgaagaagaagaaggtctgagaagtcactgaggttcttcccacctggcagtctcaggcagtgcccattcctgtggggtccctgggtgaggagacggctggagccccaccatgccccaggctgcagcctctgtcccctccacctctgaggagcgtctggggaggcacatttatgcactttgtatcaccctccgaactccccccacaccttcccttccctggatttcatcactagtggttgaaggttttgtcccttcctctcctccttccctctccctctctgcttcctcctccagcctcccttgggttttcttttgataccaatttatagcattttttataaaagcctttgatttttataatgggtgggactgtatccctgcctcaccccaggtctccgtctgccccgccaggtaccccacagagaccaatgacattttgccacttgaaacaataaataaagttttttggg

SEQ ID NO: 14720 - DNA, 2074 bp, Homo sapiens
agcggagagcgggcggccgtgcgggcggcggcggcggcacccccaggccgagccggcgcggaaggagttccagggcgatggggccgcggccggggctgacgctttgacagctggaaagagcgcggagccagcgcctgggggggagggaggggagcgcggcgaggagagcgccagcgagcgagagagcgagcgagcgccggggagggggccgggagcgaggggcagctcgggagagccggagcggtagcggcggcggcggcggcggcggcgaggctcggcgccctcttccctgcaaaccatgtttgccaaaggcaaaggctcggcggtgccctcggatgggcaggctcgggaaaagttagctttatacgtctacgaatatttactgcacgtaggagcacagaaatctgcacagaccttcttatcggagattcgatgggaaaaaaacatcacgttgggagaaccgcctgggtttttgcactcgtggtggtgtgtattttgggacctttactgtgcagctcctgaaaggagagacacttgtgaacattcaagtgaagcaaaagcctttcatgattatagtgcagcagctgccccgagccccgtgcttggcaacattccccccaacgatgggatgccgggaggccccatcccgccaggtttctttcagggtcctccggggtcacagccctcgccgcacgcacagcctccacctcacaatcctagcagcatgatgggaccccacagtcagccttttatgtcaccgcgatacgcaggcggccccaggcccccgatcagaatgggaaaccagcctccgggaggagttcctgggacacagccattgctgcccaattctatggatcccacacgacaacaaggccaccccaacatgggaggatcaatgcagagaatgaaccctccccgaggcatggggcccatgggtcccggcccacagaattacggcagcggcatgagaccaccacccaactccctcggccccgccatgcccgggattaacatgggcccgggagctggcagaccctggcccaatcctaacagtgctaactcaattccatactcctcctcatcacctggtacctatgtgggaccccctggtggtggcggtcctccaggaacacccattatgcccagtcccgcagattcaacaaattccagtgacaacatctacacaatgattaatccagtgccgcctggaggcagccggtccaacttcccgatgggtcccggctcggacggtccgatgggcggcatgggtggcatggagccacaccacatgaatggatcattagggtcaggcgacatagacggacttccaaaaaattctcctaacaacataagtggcattagcaatcctccaggcacccctcgagatgacggcgagctaggagggaacttcctccactcctttcagaacgacaattattctccaagcatgacgatgagtgtgtgatccccccttctccgagacgctgagagagcaggcattgcaggcgggaagatgccagaaattatgcaagaagtgaggtgtcattatccaggagctggtggggagggcatctccctgctcccctcaaccccctcccaccccatccacgccccctacctttcccaattttagtttcatgcaataaaaaggccaaactttttattccataaaacaagaaggacaaaactctcaaaaatgtatttcaagtcagtgaccagaaaaatcccaccccttgccctttccccaaaggaccttttctgtacatgacacttttttgttgttttttgtttggggttttaccattgttgggatttttttatttgttttcaggggggttttttgggggaaaatttttttaaatggaagcttctagcaagccccccaccccaatcaacctctatgctttcttcttaaaaaaaaaaaaaaaggaaaaaggaaaaaaaaaaaaggaaaaccagaagccctgctgtctgtctgtgcccaagcccttccaccagaaaagctagtctaggtgtgagagcccacattgtctgtagccatcaaaaataataataataaactggacagtttaca

SEQ ID NO: 14721 - DNA, 2014 bp, Homo sapiens
agcggagagcgggcggccgtgcgggcggcggcggcggcacccccaggccgagccggcgcggaaggagttccagggcgatggggccgcggccggggctgacgctttgacagctggaaagagcgcggagccagcgcctgggggggagggaggggagcgcggcgaggagagcgccagcgagcgagagagcgagcgagcgccggggagggggccgggagcgaggggcagctcgggagagccggagcggtagcggcggcggcggcggcggcggcgaggctcggcgccctcttccctgcaaaccatgtttgccaaaggcaaaggctcggcggtgccctcggatgggcaggctcgggaaaagttagctttatacgtctacgaatatttactgcacgtaggagcacagaaatctgcacagaccttcttatcggagattcgatgggaaaaaaacatcacgttgggagaaccgcctgggtttttgcactcgtggtggtgtgtattttgggacctttactgtgcagctcctgaaaggagagacacttgtgaacattcaagtgaagcaaaagcctttcatgattatagtgcagcagctgccccgagccccgtgcttggcaacattccccccaacgatgggatgccgggaggccccatcccgccaggtttctttcagggtcctccggggtcacagccctcgccgcacgcacagcctccacctcacaatcctagcagcatgatgggaccccacagtcagcctccgggaggagttcctgggacacagccattgctgcccaattctatggatcccacacgacaacaaggccaccccaacatgggaggatcaatgcagagaatgaaccctccccgaggcatggggcccatgggtcccggcccacagaattacggcagcggcatgagaccaccacccaactccctcggccccgccatgcccgggattaacatgggcccgggagctggcagaccctggcccaatcctaacagtgctaactcaattccatactcctcctcatcacctggtacctatgtgggaccccctggtggtggcggtcctccaggaacacccattatgcccagtcccgcagattcaacaaattccagtgacaacatctacacaatgattaatccagtgccgcctggaggcagccggtccaacttcccgatgggtcccggctcggacggtccgatgggcggcatgggtggcatggagccacaccacatgaatggatcattagggtcaggcgacatagacggacttccaaaaaattctcctaacaacataagtggcattagcaatcctccaggcacccctcgagatgacggcgagctaggagggaacttcctccactcctttcagaacgacaattattctccaagcatgacgatgagtgtgtgatccccccttctccgagacgctgagagagcaggcattgcaggcgggaagatgccagaaattatgcaagaagtgaggtgtcattatccaggagctggtggggagggcatctccctgctcccctcaaccccctcccaccccatccacgccccctacctttcccaattttagtttcatgcaataaaaaggccaaactttttattccataaaacaagaaggacaaaactctcaaaaatgtatttcaagtcagtgaccagaaaaatcccaccccttgccctttccccaaaggaccttttctgtacatgacacttttttgttgttttttgtttggggttttaccattgttgggatttttttatttgttttcaggggggttttttgggggaaaatttttttaaatggaagcttctagcaagccccccaccccaatcaacctctatgctttcttcttaaaaaaaaaaaaaaaggaaaaaggaaaaaaaaaaaaggaaaaccagaagccctgctgtctgtctgtgcccaagcccttccaccagaaaagctagtctaggtgtgagagcccacattgtctgtagccatcaaaaataataataataaactggacagtttaca

SEQ ID NO: 14722 - DNA, 2075 bp, Homo sapiens
gccataaaggccgccgcgcgcccacgcgcctcgcttgctgcgcgctgccggcgctccttcctcctcggctcgcgtctcactcagtgtaccttctagtcccgccatggccgctctcacccgggacccccagttccagaagctgcagcaatggtaccgcgagcaccgctccgagctgaacctgcgccgcctcttcgatgccaacaaggaccgcttcaaccacttcagcttgaccctcaacaccaaccatgggcatatcctggtggattactccaagaacctggtgacggaggacgtgatgcggatgctggtggacttggccaagtccaggggcgtggaggccgcccgggagcggatgttcaatggtgagaagatcaactacaccgagggtcgagccgtgctgcacgtggctctgcggaaccggtcaaacacacccatcctggtagacggcaaggatgtgatgccagaggtcaacaaggttctggacaagatgaagtctttctgccagcgtgtccggagcggtgactggaaggggtacacaggcaagaccatcacggacgtcatcaacattggcattggcggctccgacctgggacccctcatggtgactgaagcccttaagccatactcttcaggaggtccccgcgtctggtatgtctccaacattgatggaactcacattgccaaaaccctggcccagctgaaccccgagtcctccctgttcatcattgcctccaagacctttactacccaggagaccatcacgaatgcagagacggcgaaggagtggtttctccaggcggccaaggatccttctgcagtggcgaagcactttgttgccctgtctactaacacaaccaaagtgaaggagtttggaattgaccctcaaaacatgttcgagttctgggattgggtgggaggacgctactcgctgtggtcggccatcggactctccattgccctgcacgtgggttttgacaacttcgagcagctgctctcgggggctcactggatggaccagcacttccgcacgacgcccctggagaagaacgcccccgtcttgctggccctgctgggtatctggtacatcaactgctttgggtgtgagacacacgccatgctgccctatgaccagtacctgcaccgctttgctgcgtacttccagcagggcgacatggagtccaatgggaaatacatcaccaaatctggaacccgtgtggaccaccagacaggccccattgtgtggggggagccagggaccaatggccagcatgctttttaccagctcatccaccaaggcaccaagatgataccctgtgacttcctcatcccggtccagacccagcaccccatacggaagggtctgcatcacaagatcctcctggccaacttcttggcccagacagaggccctgatgaggggaaaatcgacggaggaggcccgaaaggagctccaggctgcgggcaagagtccagaggaccttgagaggctgctgccacataaggtctttgaaggaaatcgcccaaccaactctattgtgttcaccaagctcacaccattcatgcttggagccttggtcgccatgtatgagcacaagatcttcgttcagggcatcatctgggacatcaacagctttgaccagtggggagtggagctgggaaagcagctggctaagaaaatagagcctgagcttgatggcagtgctcaagtgacctctcacgacgcttctaccaatgggctcatcaacttcatcaagcagcagcgcgaggccagagtccaataaactcgtgctcatctgcagcctcctctgtgactcccctttctcttctcgtccctcctccccggagccggcactgcatgttcctggacaccacccagagcaccctctggttgtgggcttggaccacgagcccttagcagggaaggctggtctcccccagcctaacccccagcccctccatgtctatgctccctctgtgttagaattggctgaagtgtttttgtgcagctgacttttctgacccatgttcacgttgttcacatcccatgtagaaaaataaagatgccacggaggaggt

SEQ ID NO: 14723 - DNA, 3663 bp, Homo sapiens
gctgcgcggcgcggcgctgcggagaccgttggttcatttgcatgtccccgcctcgcgcggcggcggcggcgggtgaggagcctgaggcggcggcgggggtggctccgcgcgcggtggtctcgggggcaaaataacatggcagccagacgaattacacaggagacttttgatgctgtattacaagaaaaagccaaacgatatcacatggatgccagtggtgaggctgtaagcgaaactcttcagtttaaagctcaagatctcttaagggcagtcccaagatccagagcagagatgtatgatgacgtccacagcgatggcagatactccctcagtggatctgtagctcactctagagatgccggaagagaaggcctgagaagtgacgtatttccagggccttccttcagatcaagcaacccttccatcagtgatgacagctactttcgcaaagaatgtggccgggatctggaattttctcactctgattctcgggaccaggtcattggccaccggaaattggggcatttccgttctcaggactggaaatttgcgctccgtggttcttgggaacaagactttggccatccagtttctcaagagtcctcttggtcacaggagtatagttttggtccctctgcagttttgggggactttggatcttccaggctgattgagaaagagtgtttggagaaggagagtcgggattatgacgtggaccatcctggggaggctgactctgtgcttaggggcagcagtcaagtccaggccagaggtcgagctctaaacatcgttgaccaggaaggttccctcctaggaaagggggagactcagggcctgctcacagctaaggggggtgttgggaaacttgtcacattgagaaatgtgagcacaaaaaaaatacccaccgtgaatcgtattactcccaaaactcagggcactaaccaaatccagaaaaacactccaagtcctgatgtgaccctggggacaaacccagggacagaagatatccagttccccattcagaagatccctctggggctggatctgaagaatcttcggctccccagaagaaagatgagctttgacatcatagataagtctgatgttttttcaagatttgggatagaaataatcaaatgggcaggattccacaccataaaagatgatattaaattttcccaacttttccagactctctttgaacttgaaacagaaacctgtgctaaaatgcttgcctcattcaaatgttccttaaaaccagagcacagagatttttgcttttttactatcaaatttttaaagcactctgctttgaaaacacccagagttgataatgagtttttaaacatgcttttagacaaaggtgctgtgaagaccaaaaattgcttttttgaaatcataaagccttttgacaagtacataatgagacttcaagaccggcttctgaagagtgtcacacctttgcttatggcctgcaatgcctacgagctaagtgtcaagatgaagaccctcagtaaccccctggacttggctcttgccctagaaaccaccaactctctctgccggaagtctttggcccttttgggacagacattttccttggcctcttctttccggcaggagaaaatcttagaagctgtcggcctgcaagatatagctccctcacctgctgcgtttccaaacttcgaagactccactttgtttgggcgagagtacatagaccacctgaaggcctggctagtcagcagcggatgtcccctccaggttaagaaagccgaaccagagccgatgcgagaggaggagaaaatgattcctcctacgaaacctgaaattcaggccaaggctccaagtagtctgagtgatgctgtcccccagcgagcagatcacagggtagtgggcaccatcgaccagcttgtgaaacgtgtcatcgaaggcagcctgtctcccaaagagagaactcttctcaaagaggaccctgcttactggtttttgtctgatgaaaatagtctggagtataaatattacaagctgaagttggcagaaatgcagcggatgagcgagaacttgcgaggagccgaccagaagccgacctcagcagactgtgcagtgagggccatgctgtactcccgggctgtccgcaacctcaagaagaaactccttccgtggcagcggcgggggctcctccgtgctcaagggctccggggctggaaggcgaggagagcgaccaccgggacccagaccctcctatcctcaggcaccaggctgaaacaccacggccggcaggctccaggcctctcacaggcaaaaccatccctgccagacagaaatgatgctgccaaggactgcccgccagacccagttggaccttctcctcaggaccccagcttagaagcctcaggcccatcccccaagccagcaggagtggacatctctgaagcacctcagacctcttctccctgcccatctgctgacattgacatgaagacaatggagactgcagagaaactggctagatttgttgctcaggtgggaccagagatcgaacaattcagcatagaaaacagcaccgataaccctgacctgtggtttctacatgaccaaaatagttctgctttcaaattctatcgaaagaaagtgtttgaactatgtccatcaatttgtttcacgtcatctccgcacaaccttcacactggtggtggtgacaccacgggttctcaggagagccccgtggacctcatggaaggggaagcagagtttgaagacgagccccctccgcgggaggctgagctggagagcccagaggtgatgcctgaggaggaggacgaggacgatgaggatgggggagaggaggcccccgctcctggaggggcgggcaagtctgagggcagcacccctgccgacggccttcccggcgaggctgccgaggacgacctggctggagcacctgccttgtcacaggcctcctcaggtacctgcttccctcggaagaggatcagcagcaagtcattgaaggttggcatgattccagctcccaagagagtgtgtctcatccaggagccaaaagtccatgaaccagttcgaattgcctatgacaggcctcggggtcgtcccatgtccaaaaagaagaaacccaaggacttggacttcgcccagcagaagctgaccgataagaacctgggcttccagatgctgcagaagatgggctggaaggagggccatggcctgggctccctcggaaagggcatcagggagccggtcagcgtgggaaccccctcggaaggggaagggttgggtgctgacgggcaggagcacaaagaagacacattcgatgtgttccgacagaggatgatgcagatgtacagacacaagcgggccaacaaatagttccagggtcacccccgagaggacaacaggcatctggaagtgctctctcgccactctgggtgctttactgtctctggcttgtttccatcactggaaatcacttagagaattgtagtgtttttggtccttgataaagcctagaagacatttgtgatgttacaaaatggaagttttcttttgtttctgttttttaagatctaagaagttgtgaatgttgttaatcatttagccgttgcaataaatgtagaggaaatgcaaaaaaaaaaaaaaaaaaaaaaa

SEQ ID NO: 14724 - DNA, 3421 bp, Homo sapiens
cggacgcgtgggtcgacccacgcgtccgtcctctgctgccgctcggtcacgcttgctctttcaccatgcctggatcacttcctttgaatgcagaagcttgctggccaaaagatgtgggaattgttgcccttgagatctattttccttctcaatatgttgatcaagcagagttggaaaaatatgatggtgtagatgctggaaagtataccattggcttgggccaggccaagatgggcttctgcacagatagagaagatattaactctctttgcatgactgtggttcagaatcttatggagagaaataacctttcctatgattgcattgggcggctggaagttggaacagagacaatcatcgacaaatcaaagtctgtgaagactaatttgatgcagctgtttgaagagtctgggaatacagatatagaaggaatcgacacaactaatgcatgctatggaggcacagctgctgtcttcaatgctgttaactggattgagtccagctcttgggatggacggtatgccctggtagttgcaggagatattgctgtatatgccacaggaaatgctagacctacaggtggagttggagcagtagctctgctaattgggccaaatgctcctttaatttttgaacgagggcttcgtgggacacatatgcaacatgcctatgatttttacaagcctgatatgctatctgaatatcctatagtagatggaaaactctccatacagtgctacctcagtgcattagaccgctgctattctgtctactgcaaaaagatccatgcccagtggcagaaagagggaaatgataaagattttaccttgaatgattttggcttcatgatctttcactcaccatattgtaaactggttcagaaatctctagctcggatgttgctgaatgacttccttaatgaccagaatagagataaaaatagtatctatagtggcctggaagcctttggggatgttaaattagaagacacctactttgatagagatgtggagaaggcatttatgaaggctagctctgaactcttcagtcagaaaacaaaggcatctttacttgtatcaaatcaaaatggaaatatgtacacatcttcagtatatggttcccttgcatctgttctagcacagtactcacctcagcaattagcagggaagagaattggagtgttttcttatggttctggtttggctgccactctgtactctcttaaagtcacacaagatgctacaccggggtctgctcttgataaaataacagcaagtttatgtgatcttaaatcaaggcttgattcaagaactggtgtggcaccagatgtcttcgctgaaaacatgaagctcagagaggacacctatcatttggtcaactatattccccagggttcaatagattcactctttgaaggaacgtggtacttagttagggtggatgaaaagcacagaagaacttacgctcggcgtcccactccaaatgatgacactttggatgaaggagtaggacttgtgcattcaaacatagcaactgagcatattccaagccctgccaagaaagtaccaagactccctgccacagcagcagaacctgaagcagctgtcattagtaatggggaacattaagatactctgtgaggtgcaagacttcagggtggggtgggcatggggtgggggtatgggaacagttggaggaatgggatatctggggataattttaaaggattacatgttatgtaaatttttatgtgactgacatggagcctggatgactatcgtgtacttgggaaagtctctttgctctatttgctgacatgcttcctgttgtggtctggccaatgccaaatgtactcgaatgatgttaagggctctgtaaaacttcatacctctttggccatttgtatgcatgatgtttggtttttaaacatggtataatgaattgtgtacttctgtcagaagaaagcagaggtactaatctccaattaaaaaattttttaacatgtaagaattttgtactttgaacaacaagattacagaaagtacctgtggtttttggaaaacatttctagcttggggaatgtgacaacattccccagtgtggtaaaattggggtaaaatgtggtaaaatgtgatacgcacaaaccctttgaaaatagcaaaacaaacatgccctttttctaaaattgataaatcctaaagaggaagaaaagagctgggacaataaaacactggctctggaatctggaatgttaagtccaggccagcagtgacaaaagttattgtaatgacctctgaacagagaaacactgccattgaagaggcttctggtatagaaaacatggtacattcaggagctgtgaatatagctctaggtgtgctcctgaatcagttcatggtagattatgctgaacaacagtgagatgttattggaggtgtggatgagggagtttgttgttgcagtccttctttgcaccttattttaaagaataaatgaaacatttttctggttacttttttaaaaatttaaaatggaagggaagaataggggcagggcattattaggctatttctgatgcttcagtgttataaattcaacatagaggctgacaacctaaattcatggtgtaacacagctcttttccttttccttttttttttttttttttggtatctgttcaatgaaaataaggtatgacccaagtttttacctagtctgactagaagtattccacttcaaggtctgaagtaggacttttaccttaaaaaacaacaacaaacaaaactatcacacaggatagataagaagattggttaaacagttttgtgtagatctttttggtgctgaactatgacatgagccttatagattgtaaaatagggatagttggaactaatgtacagaactaaattttttaaactttatttgctgttaaattctgtgaagtttcagttatctaaaataaatatacacaaatatgaaatataatgtttcagattgcaaggtaatatgtaatagtagtgtttgtaagatactcttgtctaatattaactagtagtattttgatttgtacagtcataatttgttaaaatgacttcatttaacattcactgatgtagattaataatgtaagttctgatttaaagaatggtggcaaaatggtgcatgtaatacttttgcaagtgttggggagatcggtatgttttgaaaagagtaatttaacttttgggtgccaggaaatgggttttctcaaagtccattgccggcaatgggcaggcctgcaaatactggcacagagcattaatcatacaccttattaacggtgaggtgaataactttgaaataaagttttagagaaatgtttcaaaaaaaaaaaaaaaaaaaaaaaaaaaaaaaaaaaaaaaaaaaaaaaaaaaaaaaa

SEQ ID NO: 14725 - DNA, 3376 bp, Homo sapiens
tttggggctgagtttaataagcgagcgagcgagcaagcgagcgcggggggaaaaaggcagagaatgtccgccatctaccctccgctcctgggcgcgctctcattcatagcagcctcttcatgaattacagctgagggggggcggaggaggggggggtaccacacaacaccccagcaaacctccgggcccccaggcatggctagctcgtgttccgtgcaggtgaagctggagctggggcaccgcgcccaggtgaggaaaaaacccaccgtggagggcttcacccacgactggatggtgttcgtacgcggtccggagcacagtaacatacagcactttgtggagaaagtcgtcttccacttgcacgaaagctttcctaggccaaaaagagtgtgcaaagatccaccttacaaagtagaagaatctgggtatgctggtttcattttgccaattgaagtttattttaaaaacaaggaagaacctaggaaagtccgctttgattatgacttattcctgcatcttgaaggccatccaccagtgaatcacctccgctgtgaaaagctaactttcaacaaccccacagaggactttaggagaaagttgctgaaggcaggaggggaccctaataggagtattcataccagcagcagcagcagcagcagcagtagcagcagcagcagcagcagcagcagcagcagtagcagcagcagcagcagcagcagcagcagcagtagcagcagcagtagcagcagcagcagcagcagtagtaccagtttttcaaagcctcacaaattaatgaaggagcacaaggaaaaaccttctaaagactccagagaacataaaagtgccttcaaagaaccttccagggatcacaacaaatcttccaaagaatcctctaagaaacccaaagaaaataaaccactgaaagaagagaaaatagttcctaagatggccttcaaggaacctaaacccatgtcaaaagagccaaaaccagatagtaacttactcaccatcaccagtggacaagataagaaggctcctagtaaaaggccgcccatttcagattctgaagaactctcagccaaaaaaaggaaaaagagtagctcagaggctttatttaaaagtttttctagcgcaccaccactgatactcacttgttctgctgacaaaaaacagataaaagataaatctcatgtcaagatgggaaaggtcaaaattgaaagtgagacatcagagaagaagaaatcaacgttaccgccatttgatgatattgtggatcccaatgattcagatgtggaggagaatatatcctctaaatctgattctgaacaacccagtcctgccagctccagctccagctccagctccagcttcacaccatcccagaccaggcaacaaggtcctttgaggtctataatgaaagatctgcattctgatgacaatgaggaggaatcagatgaagtggaggataacgacaatgactctgaaatggagaggcctgtaaatagaggaggcagccgaagtcgcagagttagcttaagtgatggcagcgatagtgaaagcagttctgcttcttcacccctacatcacgaacctccaccacccttactaaaaaccaacaacaaccagattcttgaagtgaaaagtccaataaagcaaagcaaatcagataagcaaataaagaatggtgaatgtgacaaggcatacctagatgaactggtagagcttcacagaaggttaatgacattgagagaaagacacattctgcagcagatcgtgaaccttatagaagaaactggacactttcatatcacaaacacaacatttgattttgatctttgctcgctggacaaaaccacagtccgtaaactacagagttacctggaaacatctggaacatcctgaggatataacaactggatgcatcaagaactattgtgttttttttttttggttttttttttttttggttgtgattttttgttcttgttgtttatatgaaaacactcaaaatgatgcaaccaaaagggaaaaaataaaaatcaaacaaccttcagctttatttttctttaaagccagtcatcatctcttgataaaggagaggttaaagcaaaccagcctcagcggaccactcttctctccaaggaaatccccgggaagagttagcctggatagccttgaaaacaaacaaatcaaacacaacacaagaaaactcaaagaatgtgtatggtatcatgtatctctctgtggtggttcattccacaggacgaatgcatattcaacacactgccttattacataactgatctatttattatcgcatacagatattctaagtcgttgagggaatgacaccatcagacattataagtacttggtcccgtggatgctctttcaatgcagcacccttgccatcccaagcccagtgaccttactcgtataccgtgccactttccaccaactttttccaagtcctttaactcgttgcagtctgtattttccaccttttgtttttccagttccaggacacagattatcaactggggggaccaaatagccaccttgattttcttctttgtggtctttttcctgaaagttggggcccagtccttggctgtatccatgtaatgatcttggaccatggtagaaaatgcaccaaataggatcatatgaattgctgtctagccttagtcaataaacttgtaggacttttaaacaaaagtgtacctgtaaatgtcctgaatccagcattgttgagctgtcatcaacattcttgtgtctgttttactgttacaatattaggtgaatatggaagtaaaggcattccacaggatcatcatttaaaaaaaaagaattctggtcctgttttctaaaaaaaaaaaactgttgtagaaattcttaatttggatctatttattagtcagagtttcagctttcttcagctgccagtgtgttactcatctttatcctaaaaatctggaatcagagatttttgtttgttcacatatgattctcttagacacttttatatttgaaaaaattaaaatctttctttggggaaaaattcttggttattctgccataacagattatgtattaacttgtagattcagtggttcaatacctgtttagttgcttgctaatatttccagaaggatttcttgtattggtgaaagacggttggggatggggggatttttttgttcttgttgtacccttgttttgaaactagaaatctgtcctgtggcatgcaaaagaaagcaaattatttttaaaagaaaaaaaccaaagtacttttggtgtcattattccatcttctccataagtggagaaatgaaaagtaagaacagctcatcttcaaagtttttactagaaattc

SEQ ID NO: 14726 - DNA, 1434 bp, Homo sapiens
gggttaaggcacctgggccaccgcccctgccggcccctcctcccgcggccgggaagaggaaagtcgcggcgggggcgcggcccggtctccgtccccacccgcccgccgtcccgccggcccgagccgtggcgcccagagctgcgagccgctcgcccctccgccgctccggcccgggccgccatgtcgctgtggaagaaaaccgtctaccggagtctgtgcctggccctggccctgctcgtggccgtgacggtgttccaacgcagtctcacccctggtcagtttctgcaggagcctccgccacccaccctggagccacagaaggcccagaagccaaatggacagctggtgaaccccaacaacttctggaagaacccgaaagatgtggctgcgcccacgcccatggcctctcaggggccccaggcctgggacgtgaccaccactaactgctcagccaatatcaacttgacccaccagccctggttccaggtcctggagccgcagttccggcagtttctcttctaccgccactgccgctacttccccatgctgctgaaccacccggagaagtgcaggggcgatgtctacctgctggtggttgtcaagtcggtcatcacgcagcacgaccgccgcgaggccatccgccagacctggggccgcgagcggcagtccgcgggtgggggccgaggcgccgtgcgcaccctcttcctgctgggcacggcctccaagcaggaggagcgcacgcactaccagcagctgctggcctacgaagaccgcctctacggcgacatcctgcagtggggctttctcgacaccttcttcaacctgaccctcaaggagatccacttcctcaagtggctggacatctactgcccccacgtccccttcattttcaaaggcgacgatgacgtcttcgtcaaccccaccaacctgctagaatttctggctgaccggcagccacaggaaaacctgttcgtgggcgatgtcctgcagcacgctcggcccattcgcaggaaagacaacaaatactacatcccgggggccctgtacggcaaggccagctatccgccgtatgcaggcggcggtggcttcctcatggccggcagcctggcccggcgcctgcaccatgcctgcgacaccctggagctctacccgatcgacgacgtctttctgggcatgtgcctggaggtgctgggcgtgcagcccacggcccacgagggcttcaagactttcggcatctcccggaaccgcaacagccgcatgaacaaggagccgtgctttttccgcgccatgctcgtggtgcacaagctgctgccccctgagctgctcgccatgtgggggctggtgcacagcaatctcacctgctcccgcaagctccaggtgctctgaccccagccgggctactaggacaggccagggcacttgctcctgagcccc

SEQ ID NO: 14727 - DNA, 930 bp, Homo sapiens
atgagggaaaataaccagtcctctacactggaattcatcctcctgggagttactggtcagcaggaacaggaagatttcttctacatcctcttcctgttcatttaccccatcacattgattggaaacctgctcattgtcctagccatttgctctgatgttcgccttcacaaccccatgtattttctccttgccaacctctccttggttgacatcttcttctcatcggtaaccatccctaagatgctggccaaccatctcttgggcagcaaatccatctcttttgggggatgcctaacgcagatgtatttcatgatagccttgggtaacacagacagctatattttggctgcaatggcatatgatcgagctgtggccatcagccacccacttcactacacaacaattatgagtccacggtcttgtatctggcttattgctgggtcttgggtgattggaaatgccaatgccctcccccacactctgctcacagctagtctgtccttctgtggcaaccaggaagtggccaacttctactgtgacattacccccttgctgaagttatcctgttctgacatccactttcatgtgaagatgatgtacctaggggttggcattttctctgtgccattactatgcatcattgtctcctatattcgagtcttctccacagtcttccaggttccttccaccaagggcgtgctcaaggccttctccacctgtggttcccacctcacggttgtctctttgtattatggtacagtcatgggcacgtatttccgccctttgaccaattatagcctaaaagacgcagtgatcactgtaatgtacacggcagtgaccccaatgttaaatcctttcatctacagtctgagaaatcgggacatgaaggctgccctgcggaaactcttcaacaagagaatctcctcgtaa

SEQ ID NO: 14728 - DNA, 1983 bp, Homo sapiens
gaggactgcagtgtaggactttcctgcagaataccatttgatcctattaagaattgtccaaatgttggagcatttgattgaaaaatccttcttagccattttaaagatagctttccaatgattagacgaattgattctttctgtgactcatcagttcatttcctgtaaaattcatgtcttgctgttgatttgtgaataagaaccagagcttgtagaaaccactttaatcatatccaggagtttgcaagaaacaggtgcttaacactaattcacctcctgaacaagaaaaatgggctgtgaccggaactgtgggctcatcgctggggctgtcattggtgctgtcctggctgtgtttggaggtattctaatgccagttggagacctgcttatccagaagacaattaaaaagcaagttgtcctcgaagaaggtacaattgcttttaaaaattgggttaaaacaggcacagaagtttacagacagttttggatctttgatgtgcaaaatccacaggaagtgatgatgaacagcagcaacattcaagttaagcaaagaggtccttatacgtacagagttcgttttctagccaaggaaaatgtaacccaggacgctgaggacaacacagtctctttcctgcagcccaatggtgccatcttcgaaccttcactatcagttggaacagaggctgacaacttcacagttctcaatctggctgtggcagctgcatcccatatctatcaaaatcaatttgttcaaatgatcctcaattcacttattaacaagtcaaaatcttctatgttccaagtcagaactttgagagaactgttatggggctatagggatccatttttgagtttggttccgtaccctgttactaccacagttggtctgttttatccttacaacaatactgcagatggagtttataaagttttcaatggaaaagataacataagtaaagttgccataatcgacacatataaaggtaaaaggaatctgtcctattgggaaagtcactgcgacatgattaatggtacagatgcagcctcatttccaccttttgttgagaaaagccaggtattgcagttcttttcttctgatatttgcaggtcaatctatgctgtatttgaatccgacgttaatctgaaaggaatccctgtgtatagatttgttcttccatccaaggcctttgcctctccagttgaaaacccagacaactattgtttctgcacagaaaaaattatctcaaaaaattgtacatcatatggtgtgctagacatcagcaaatgcaaagaagggagacctgtgtacatttcacttcctcattttctgtatgcaagtcctgatgtttcagaacctattgatggattaaacccaaatgaagaagaacataggacatacttggatattgaacctataactggattcactttacaatttgcaaaacggctgcaggtcaacctattggtcaagccatcagaaaaaattcaagtattaaagaatctgaagaggaactatattgtgcctattctttggcttaatgagactgggaccattggtgatgagaaggcaaacatgttcagaagtcaagtaactggaaaaataaacctccttggcctgatagaaatgatcttactcagtgttggtgtggtgatgtttgttgcttttatgatttcatattgtgcatgcagatcgaaaacaataaaataagtaagtatgtaccaaaaaatattgcttcaataatattagcttatatattacttgttttcactttatcaaagagaagttacatattaggccatatatatttctagacatgtctagccactgatcatttttaaatataggtaaataaacctataaatattatcacgcagatcactaaagtatatctttaattctgggagaaatgagataaaagatgtacttgtgaccattgtaacaatagcacaaataaagcacttgtgccaaagttgtccaaaaaa

SEQ ID NO: 14729 - DNA, 2480 bp, Homo sapiens
agtactaacatggactaatctgtgggagcagtttattccagtatcacccagggtgcagccacaccaggactgtgttgaagggtgttttttttcttttaaatgtaatacctcctcatcttttcttcttacacagtgtctgagaacatttacattatagataagtagtacatggtggataacttctacttttaggaggactactctcttctgacagtcctagactggtcttctacactaagacaccatgaaggagtatgtgctcctattattcctggctttgtgctctgccaaacccttctttagcccttcacacatcgcactgaagaatatgatgctgaaggatatggaagacacagatgatgatgatgatgatgatgatgatgatgatgatgatgatgaggacaactctctttttccaacaagagagccaagaagccatttttttccatttgatctgtttccaatgtgtccatttggatgtcagtgctattcacgagttgtacattgctcagatttaggtttgacctcagtcccaaccaacattccatttgatactcgaatgcttgatcttcaaaacaataaaattaaggaaatcaaagaaaatgattttaaaggactcacttcactttatggtctgatcctgaacaacaacaagctaacgaagattcacccaaaagcctttctaaccacaaagaagttgcgaaggctgtatctgtcccacaatcaactaagtgaaataccacttaatcttcccaaatcattagcagaactcagaattcatgaaaataaagttaagaaaatacaaaaggacacattcaaaggaatgaatgctttacacgttttggaaatgagtgcaaaccctcttgataataatgggatagagccaggggcatttgaaggggtgacggtgttccatatcagaattgcagaagcaaaactgacctcagttcctaaaggcttaccaccaactttattggagcttcacttagattataataaaatttcaacagtggaacttgaggattttaaacgatacaaagaactacaaaggctgggcctaggaaacaacaaaatcacagatatcgaaaatgggagtcttgctaacataccacgtgtgagagaaatacatttggaaaacaataaactaaaaaaaatcccttcaggattaccagagttgaaatacctccagataatcttccttcattctaattcaattgcaagagtgggagtaaatgacttctgtccaacagtgccaaagatgaagaaatctttatacagtgcaataagtttattcaacaacccggtgaaatactgggaaatgcaacctgcaacatttcgttgtgttttgagcagaatgagtgttcagcttgggaactttggaatgtaataattagtaattggtaatgtccatttaatataagattcaaaaatccctacatttggaatacttgaactctattaataatggtagtattatatatacaagcaaatatctattctcaagtggtaagtccactgacttattttatgacaagaaatttcaacggaattttgccaaactattgatacataagggttgagagaaacaagcatctattgcagtttctttttgcgtacaaatgatcttacataaatctcatgcttgaccattcctttcttcataacaaaaaagtaagatattcggtatttaacactttgttatcaagcatattttaaaaagaactgtactgtaaatggaatgcttgacttagcaaaatttgtgctctttcatttgctgttagaaaaacagaattaacaaagacagtaatgtgaagagtgcattacactattcttattctttagtaacttgggtagtactgtaatatttttaatcatcttaaagtatgatttgatataatcttattgaaattaccttatcatgtcttagagcccgtctttatgtttaaaactaatttcttaaaataaagccttcagtaaatgttcattaccaacttgataaatgctactcataagagctggtttggggctatagcatatgcttttttttttttaattattacctgatttaaaaatctctgtaaaaacgtgtagtgtttcataaaatctgtaactcgcattttaatgatccgctattataagcttttaatagcatgaaaattgttaggctatataacattgccacttcaactctaaggaatatttttgagatatccctttggaagaccttgcttggaagagcctggacactaacaattctacaccaaattgtctcttcaaatacgtatggactggataactctgagaaacacatctagtataactgaataagcagagcatcaaattaaacagacagaaaccgaaagctctatataaatgctcagagttctttatgtatttcttattggcattcaacatatgtaaaatcagaaaacagggaaattttcattaaaaatattggtttgaaataaaaaaaaaaaaaa

SEQ ID NO: 14730 - DNA, 2209 bp, Homo sapiens
acagtcagagggaacgcccgcgcggggagccaggggcgcccgaccccgccgccgccgcagcggcgcgcagcccccgacgcgccctgtggggacccggaccaggagggaccctgccccgggaaaaggctgtggagacctgggctccgaccccagttcatccccccacacccccgccgccccgtgccaccctggtccgcgctggggaccctatcctgcccctcgtgtcagcccggcactggccagaatcgcgggcatggcggtgaccatgctgcaggactggtgccggtggatgggggtcaacgctcgcaggggcctgctcatcctgggcatcccggaggactgtgatgatgccgaattccaagagtccctcgaggctgccctgaggcctatgggacactttacagtgctaggcaaagcgtttcgagaggaggataatgccaccgcggccctggtcgagctcgaccgggaagtcaactatgctttggtccccagggaaatccccggcactgggggcccgtggaacgtggtctttgtgccccgttgctcaggcgaggagtttctcggtctcggtcgcgtgttccacttcccggagcaagaggggcagatggtggagagcgtggccggcgccctgggtgtggggctgcgcagggtgtgctggctgcgatccatcggtcaggcggtccagccctgggtggaggccgtgaggtgccagagcctgggtgtgttttccgggagggaccagccagccccaggggaggagtcctttgaggtctggctagaccacaccaccgaaatgctgcatgtgtggcagggggtctcggaaagggagaggaggaggaggctgctggaaggcttgcgtgggaccgccctgcagctcgtgcacgcgctcctggcggagaaccccgccaggacggcgcaggactgtctggcggccctggcccaggtgtttggagacaacgagtcccaggcgaccatccgggtgaagtgtctgaccgctcagcagcagtcaggcgagcgtctctcagctttcgtgttgcggctggaagtgctgctgcagaaggccatggagaaggaggccctggccagagcatccgccgaccgcgtgcgcctgaggcagatgctcaccagggcccaccttactgagcctctggatgaagcactgaggaagctgagaatggccgggaggtctccaagtttcttggagatgctggggctcgttcgggagtctgaggcatgggaggccagtctagccaggagcgtgagagcccagacacaggaaggggccggtgcccgggctggtgcccaggctgttgccagagccagcactaaagtagaggcggtcccaggaggtcctggtcgggagccagagggcctcctccaggcaggaggccaggaggctgaggagctcctccaggaggggctcaagcccgtcctggaggaatgtgataactaggttggggctggggaggcagcccagcgcgagtcctccccgggcaaataggctccgagggccccggggcctcctctcctcctctcaggcagcagggccctggagacaggcggaggcggggccagggccggtccctcaccccacatcgggatcggggccccccacttccccccaaggggccctgcccaccaccaccttcccggtgacccagatgaccacatttaataccaaatggggtggggggaggcgcccctccagtgccaggggcacgtgctgtgagcttcctgggagcccaggttgtgctcactgctctcccgtatcgtgagcaccacctctgctttccctgcgtagatctaggccaggggctgcttgtttttgtggagccgtgtgtgttcttctctgagcagctcctccccggaggaccccagcgcagtcccgggagatggcggaaagaaggcaccagggcacagtggacactcatcccgtgacagcgatggtgaccatgactgtgggagagagaacaggacccgggatggagtggggctgtctgagtttccccagtgaactttgtgctttggcgttccacccctgttgttacttgttactgagtttcctagacctggggtgggtgttcccccaggaggaggggggtcccgacctgtgtcctgtggtggccatttgcagcttctgtgttgtgattcccttctcttcaacggtttcagtacatatctctcttcaataaatttcattcagtgttcc

SEQ ID NO: 14731 - DNA, 2764 bp, Homo sapiens
agctctcagagggaattgagcacccggcagcggtctcaggccaagccccctgccagcatggccagcgagttcaagaagaagctcttctggagggcagtggtggccgagttcctggccacgaccctctttgtcttcatcagcatcggttctgccctgggcttcaaatacccggtggggaacaaccagacggcggtccaggacaacgtgaaggtgtcgctggccttcgggctgagcatcgccacgctggcgcagagtgtgggccacatcagcggcgcccacctcaacccggctgtcacactggggctgctgctcagctgccagatcagcatcttccgtgccctcatgtacatcatcgcccagtgcgtgggggccatcgtcgccaccgccatcctctcaggcatcacctcctccctgactgggaactcgcttggccgcaatgacctggctgatggtgtgaactcgggccagggcctgggcatcgagatcatcgggaccctccagctggtgctatgcgtgctggctactaccgaccggaggcgccgtgaccttggtggctcagccccccttgccatcggcctctctgtagcccttggacacctcctggctattgactacactggctgtgggattaaccctgctcggtcctttggctccgcggtgatcacacacaacttcagcaaccactggattttctgggtggggccattcatcgggggagccctggctgtactcatctacgacttcatcctggccccacgcagcagtgacctcacagaccgcgtgaaggtgtggaccagcggccaggtggaggagtatgacctggatgccgacgacatcaactccagggtggagatgaagcccaaatagaaggggtctggcccgggcatccacgtagggggcaggggcaggggcgggcggagggaggggaggggtgaaatccatactgtagacactctgacaagctggccaaagtcacttccccaagatctgccagacctgcatggtcaagcctcttatgggggtgtttctatctctttctttctctttctgtttcctggcctcagagcttcctggggaccaagatttaccaattcacccactcccttgaagttgtggaggaggtgaaagaaagggacccacctgctagtcgcccctcagagcatgatgggaggtgtgccagaaagtcccccctcgccccaaagttgctcaccgactcacctgcgcaagtgcctgggattctaccgtaattgctttgtgcctttgggcacggccctccttcttttcctaacatgcaccttgctcccaatggtgcttggagggggaagagatcccaggaggtgcagtggagggggcaagctttgctccttcagttctgcttgctcccaagcccctgacccgctcggacttactgcctgaccttggaatcgtccctatatcagggcctgagtgacctccttctgcaaagtggcagggaccggcagagctctacaggcctgcagcccctaagtgcaaacacagcatgggtccagaagacgtggtctagaccagggctgctctttccacttgccctgtgttctttccccaggggcatgactgtcgccacacgcctctgtgtacatgtgtgcagagcagacaggctacaaagcagagatcgacagacagccaggtagttggaactttctgttccctatggagaggcttccctacacagggcctgctattgcagaatgaagccatttagagggtgaaggagaaatacccatgttacttctctgagttttagttggtctttccatctatcactgcattatcttgctcattcttcagttctctactccctcttgtcagtgtagacacaggtcaccattatgctggtgtatgtttatcaaagagcacttgagctgtctgaagcccaaagcctgaggacagaaagaccctgatgcaggtcagcccatggaggcagatgcccttgctgggcctgggggttttccaagccctcagctggtcctgaccaggatggagcaagctcttcccttgctcatgagctcctgatcagaggcatttgagcagctgaataacctgcacaggcttgctgtatgacccctggccacagccttccctctgcattgacctggaggggagaggtcagccttgacctaatgaggtagctatagttgcagcccaaggacagttcagagatcaggatcagctttgaaggctggattctatctacataagtcctttcaattccaccagggccagagcagctccaccactgtgcacttagccatgatggcaacagaaaccaagagacacaattacgcaggtatttagaagcagagggacaaccagaaggcccttaactatcaccagtgcatcacatctgcacactctcttctccattccctagcaggaacttctagctcatttaacagataaagaaactgaggcccacggtttcagctagacaatgatttggccaggcctagtaaccaaggccctgtctctggctactccctggaccacgaggctgattcctctcatttccagcttctcagtttctgcctgggcaatggccaggggccaggagtggggagagttgtgatggaggggagaggggtcacacccaccccctgcctggttctaggctgctgcacaccaaggccctgcatctgtctgctctgcatatatgtctctttggagttggaatttcattatatgttaagaaaataaaggaaaatgacttgtaaggtcaaaaaaaaaa

SEQ ID NO: 14732 - DNA, 3908 bp, Homo sapiens
ccgcccgcccgccttgtcccgcgtcgccgctcttcgcgtgcccgcgcgccccgggcccggccgctgtgtcgccctgagcggagcgccgcccgcgggatccccacgcggaaagggggcgcgccccggcggcggcctggcctcggacgcccccggccgggctagaagccgccgcggcagcagattctcttcaggggaagagtccacatcccacctcatcatgtcccgaagaagccagcgcctcacgcgctactcccagggtgacgatgacggcagcagcagcagcggagggagctcggtggctgggagtcagagcaccctgtttaaagacagtcctctcaggaccttgaagaggaaatccagcaacatgaagcgcctgtccccagcgccacagctgggcccgtcctctgatgcacacacctcctactacagtgagtcgctggtccacgagtcctggttcccacccaggagctccctggaggaactgcatggtgacgccaactggggtgaggacctgcgggtgcggaggaggagaggcacgggtggctcagagagcagcagggccagcgggcttgtggggcgcaaggccaccgaggacttcctgggctcttcctcgggctactcctctgaggacgactacgtgggctactcggatgtggaccagcagagttccagctcgcggctccgaagcgccgtctcacgggcgggctccttactctggatggtggccacttcgccaggccggctcttcagacttctctactggtgggctggcaccacctggtaccgcctgaccacagctgcctccctccttgacgtcttcgttttaaccaggcgcttctcgtccctgaagacgttcctctggttcctgctgccgctgctcttgctgacgtgcctgacgtatggtgcttggtatttctacccctatgggctgcagacattccaccctgctttggtttcctggtgggcagcgaaggacagcaggaggccggatgagggctgggaagccagagactcatcgccacatttccaggctgagcagcgtgttatgtcccgggtacactctctggagcggcgtctggaagctcttgctgctgaattttcctccaactggcagaaggaggccatgcggctggaacgtctggagctgcggcaaggggctcctggccagggaggtggtggtggcctgagccacgaggacaccctggcgctgctggaggggctagtgagccgccgtgaagctgccctgaaggaggatttccgcagggaaactgctgctcgcatccaggaagaactgtctgccctgagagcagagcatcagcaagactcagaagacctcttcaagaagatcgtccgggcctcccaggagtccgaggctcgcatccagcagctgaagtcagagtggcaaagcatgacccaggagtccttccaggagagctctgtgaaggagctgaggcggctggaggaccagctggccggcctgcagcaggagctggcggctctggcactgaagcagagctcggtggcggaagaagtgggcctgctgccccagcagatccaggccgtgcgggacgacgtggaatctcagttcccggcctggatcagtcagttccttgcccgaggtggagggggccgcgtggggctccttcagagagaggagatgcaagctcagctgcgagagctggagagcaagatcctcacccatgtggcagagatgcagggcaagtcggccagggaagccgcggcctccctgagcctgacgctgcagaaagaaggtgtgattggagtgacagaggagcaggtgcaccacatcgtgaagcaggccctgcagcgctacagtgaggaccgcatcgggctggcagactacgccctggagtcaggaggggccagcgtcatcagcacccgatgttctgagacctacgagaccaagacggccctcctcagcctcttcggcatccccctgtggtaccactcccagtcaccccgagtcatcctccagccagatgtgcacccaggcaactgctgggccttccaggggccacaaggcttcgccgtggtccgcctctctgcccgcatccgccccacagccgttaccttagagcatgtgcccaaggccttgtcacccaacagcactatctccagtgcccccaaggacttcgccatctttgggtttgacgaagacctgcagcaggaggggacactccttggcaagttcacttacgatcaggacggcgagcctattcagacgtttcactttcaggcccctacgatggccacgtaccaggtggtggagctgcggatcctgactaactggggccaccccgagtacacctgcatctaccgcttcagagtgcatggggagcccgcccactagccctgcttactggtgcctgctgccagccatctgggagtgggtgaacagcaccccgccgcttcccccacacgcttgctcggcgctctgacttctaggagcacaagagaggagcctgtggccccatgcagatgaaaaggacgggcagggtctcctgagcagcaggtggctcgaggcggttagcaggctccagcagctcccttcttccttccctctgtgcccgtggcgtctgcttcccatcctgggagtgtgtatatatgtagcatatcatgggggactgggaagttgggagaggtaggacctgactggtcttggctggggtcaggggctggtgcctgggagctgatgaagcaggtgccagggctgtgggaggggcaagctacggcctgggctaggtgagctgcctctgcccctgggcaaggaagcgaggccctctgggaggagggtgcttagctccagagcaggatgggacttccccaggcaggaagcacttgatggagagctgcccagctctcctacaaggttagtgccctccacctagggaagcatgaaccacagggtccctgagggccttcgacaaaagtgtgtatttgtcccggggagggtagcagtgggccatggggcttcttgtgccctaaaggggactggctgctgtgatcttctaaggggcccagggccaaccctgtaggcttcccctctgctggggacggtagttgcttttctctctcctgatgctaggttggggcccaccctgctccctgttcctgctagggcctgccagtgcccctgagcttgctttccacattctcccagggtatggagacctagacctgtctttggggccattagcatctggggttatagcaagaagagtggggagcatggaactcctgggctcttgtggggacgttcagggtatcggggtgcgaggtctgtctgcaccggcccccacatctaaccaggccctgatgtaggggtcgtccgctcaggctgcccccttgggctcttgcagctcttgttcaggtagtcgcccttctggtttgttctctgtggggcagttggtgggggctgggggaagaggctggcagaagttaccctggatagggaagggggaggaggggacttttagagccagcaggccccactgtattatgtatatatttttcaaggtctgtttttctaactgaaaagctaagggcttgattcctagccccgttctgtggggcactgggtgatactcagtttcttgttcctggccgtggagaggggcctggggcactggttccggctgtgtctggtggtctggctgcggggaaggggcaagaaggcgggcaggccttcactgcagcactgagcctcaaatccgctctggagcatgaggctggatgcagtggtggtgaggccgccccgctccatcccgaggcagccagggtttgttttgcgctctcctgtcacaaatgctgcactattggttcttaagttttttatctccagatcctaatttatgcctatgcaaaaaataaatgacgcccaagagctg

SEQ ID NO: 14733 - DNA, 2186 bp, Homo sapiens
ggatgttgcccaggtacaaggccaggatcttcgggacctggcttcatttggagttcagctaccaaaaggaaaccttcctctgggtcctggagtatttggcctgaaattgggaactcggaagttgctgctccagggcgctccctgcggagctccgccgcccgcctctccgcccggcctttcccggcgtccccacgcggggcgcaaccgcgagaaagaaacgcaggtcgcaccgtcagcgcccagagcagcgccagtttccgggcccgggctgctctcggagccatgagctgcggccgcccccctcccgacgtggacggcatgatcaccctcaaggtggacaacctgacctaccgcacctctcccgacagcttgaggcgcgtgttcgagaagtacgggcgcgtgggcgacgtgtacatcccgcgggagccccacaccaaggcgccccggggcttcgctttcgtccgctttcacgaccggcgcgacgcccaagacgccgaggccgccatggacggggcggagctggacggacgcgagctgcgggtgcaggtggcgcgctatggccgccgggacctgccccgcagccgccagggagagccacgcggcaggtccagaggcggcggctacggacggcggagccgcagctacgggcggcggagccgcagccccaggcggcgacaccgcagccgatcccggggtcccagctgctccaggtcccgcagccgatctcgctataggggttctcgctatagccggtctccctacagccgatctccttacagccggtcgcgctacagccgctctccctacagcagatctcgctacagggaatctcgctacggcggatctcactacagctcatctggttacagtaactctcgctacagccgatatcacagcagccggtctcactcgaagtctgggtcctccactagctctcgctctgcatcaacctccaaatcgagctctgcgcgacgatccaagtcctcctcggtctccaggtctcgctcgcggtccaggtcttcatctatgaccaggagtcctccccgggtatccaagaggaaatccaagtcaaggtcgcgatccaagaggccccccaagtctcctgaagaggaaggacagatgtcctcttaagaaaatgatgcatcaggaagcaacgtgatggaggacttgggggaaaaggatcacatactcagtctatggaagcaacgtccctggaagaagaggctgcctattgaaaaggttgtatcacacttttctacctttttgccagtttgaagctttgcatcaggtggcaaaattcattctatgtgccgttttgttgttattcacattttattgtaacttaggaggtgaacgacctaagattacgttattgggtttggatatttgaggcaaaaatttatttttatttctatagtgatgactgttttggtttgaaatgaacagattggtaacctaatttgtggcctcctgacttttaaggaaacgtgtgcagccattacacacagcctaacgctgtcaagacattgcttcaacattgccttcattccttaaaaacctacaaaaggtggtgtaaattaatatggataattttatttacctccaggtctaaaaggtagtgtgacccaaatttgtataaagatttttcatgtgaaaggactggggttttagcaaacacaggtctaatctcttttgtgtttttgtgcaccaggcccggctgcgtagcagttgagtgatgctggttagctattaaggtggcctgttgcagtgcagagtgctgagctgcttcctgttttcttctgattgctcctggggaaaacacgccttgtcctgaagaacaaatggctgtccagtttattaaaatgcctgtcaactgcacttccagtcacccaggccttgcagataaataatggagcatgcagtgagcacatctagctgacgataatcacaccttttcccccgtcttttctgaaaaattgtaaatctgatcatatcaacatgtatgaacttaaaatatggagaatgttatggaagaaatagtttataagtttgttaagtacttataacatggtttatctttttgattattaattttttacgctaaccattgtttctgtagttaaaattgttttcttggtgttatcttttctcagaataaaattagaaacttttgatggaaaaaaaaa

SEQ ID NO: 14734 - DNA, 1598 bp, Homo sapiens
agctgcggcgctgggctggcggcggcgagtccacgtgctccccgcggccggttgaaaccgttggcgggcgctggctgagaggcaatgtttgctgtcttccattggagtgactgaatttctacatgacggctttttgacaagacttaaaacctgtcttggatagagaatatttagccatttacctaaaaatggtattttttacatgcaatgcatgtggtgaatcagtgaagaaaatacaagtggaaaagcatgtgtctgtttgcagaaactgtgaatgcctttcttgcattgactgcggtaaagatttctggggcgatgactataaaaaccacgtgaaatgcataagtgaagatcagaagtatggtggcaaaggctatgaaggtaaaacccacaaaggcgacatcaaacagcaggcgtggattcagaaaattagtgaattaataaagagacccaatgtcagccccaaagtgagagaacttttagagcaaattagtgcttttgacaacgttcccaggaaaaaggcaaaatttcagaattggatgaagaacagtttaaaagttcataatgaatccattctggaccaggtgtggaatatcttttctgaagcttccaacagcgaaccagtcaataaggaacaggatcaacggccactccacccagtggcaaatccacatgcagaaatctccaccaaggttccagcctccaaagtgaaagacgccgtggaacagcaaggggaggtgaagaagaataaaagagaaagaaaggaagaacggcagaagaaaaggaaaagagaaaagaaagaactaaagttagaaaaccaccaggaaaactcaaggaatcagaagcctaagaagcgcaaaaagggacaggaggctgaccttgaggctggtggggaggaagtccctgaggccaatggctctgcagggaagaggagcaagaagaagaagcagcgcaaggacagcgccagtgaggaagaggcacgcgtgggcgcagggaagaggaagcggaggcactcggaagttgaaacagattctaagaagaaaaagatgaagctcccagagcatcctgagggcggagaaccagaagacgatgaggctcctgcaaaaggtaaattcaactggaagggaactattaaagcaattctgaaacaggccccagacaatgaaataaccatcaaaaagctaaggaaaaaggttttagctcagtactacacagtgacagatgagcatcacagatccgaagaggaactcctggtcatctttaacaagaaaatcagcaagaaccctacctttaagttattaaaggacaaagtcaagcttgtgaaatgaacatttgtgtatttaaaaattgaatccattctgctgacttcttcctttcactgctgtttataaaatgtgtaatgaattctaacaactcaaattttgctttttgaagctgtatttttaagttaagaaaatatatttttggtataacttttatgagaaaaataaaatatattctggtccaaaaaaaaaaaaaaaaaaaaaaaaaaaaaaaaaaaaaaaaaaaaaaaaaaaaaaaaaaaaaaaaaaaaaaaaaaaaaaaaaaaaaaaaaaaaa

SEQ ID NO: 14735 - DNA, 3772 bp, Homo sapiens
gggggctttcttgggcttggctgcttggaacacctgcctccaaggaccggcctcggaggggtcgccgggaaagggagggaagaaggaagggcggggccggcccccctgcgcccgccccgcgcctctgcgcgcccctgtccgccccggcccagcccagcccagccccgcgggccggtcacacgcgcagccagccggccgcctcccgcgcccaagcgcgccgctctgctgtgccctgcgcccttgccccgcgccagcttctgcgcccgcagcccgcccggcgcccccggtgaccgtgaccctgccctgggcgcggggcggagcaggcatgtcccgcccggggaccgctaccccagcgctggccctggtgctcctggcagtgaccctggccggggtcggagcccagggcgcagccctcgaggaccctgattattacgggcaggagatctggagccgggagccctactacgcgcgcccggagcccgagctcgagaccttctctccgccgctgcctgcggggcccggggaggagtgggagcggcgcccgcaggagcccaggccgcccaagagggccaccaagcccaagaaagctcccaagagggagaagtcggctccggagccgcctccaccaggtaaacacagcaacaaaaaagttatgagaaccaagagctctgagaaggctgccaacgatgatcacagtgtccgtgtggcccgtgaagatgtcagagagagttgcccacctcttggtctggaaaccttaaaaatcacagacttccagctccatgcctccacggtgaagcgctatggcctgggggcacatcgagggagactcaacatccaggcgggcattaatgaaaatgatttttatgacggagcgtggtgcgcgggaagaaatgacctccagcagtggattgaagtggatgctcggcgcctgaccagattcactggtgtcatcactcaagggaggaactccctctggctgagtgactgggtgacatcctataaggtcatggtgagcaatgacagccacacgtgggtcactgttaagaatggatctggagacatgatatttgagggaaacagtgagaaggagatccctgttctcaatgagctacccgtccccatggtggcccgctacatccgcataaaccctcagtcctggtttgataatgggagcatctgcatgagaatggagatcctgggctgcccactgccagatcctaataattattatcaccgccggaacgagatgaccaccactgatgacctggattttaagcaccacaattataaggaaatgcgccagttgatgaaagttgtgaatgaaatgtgtcccaatatcaccagaatttacaacattggaaaaagccaccagggcctgaagctgtatgctgtggagatctcagatcaccctggggagcatgaagtcggtgagcccgagttccactacatcgcgggggcccacggcaatgaggtgctgggccgggagctgctgctgctgctggtgcagttcgtgtgtcaggagtacttggcccggaatgcgcgcatcgtccacctggtggaggagacgcggattcacgtcctcccctccctcaaccccgatggctacgagaaggcctacgaagggggctcggagctgggaggctggtccctgggacgctggacccacgatggaattgacatcaacaacaactttcctgatttaaacacgctgctctgggaggcagaggatcgacagaatgtccccaggaaagttcccaatcactatattgcaatccctgagtggtttctgtcggaaaatgccacggtggctgccgagaccagagcagtcatagcctggatggaaaaaatcccttttgtgctgggcggcaacctgcagggcggcgagctggtggtggcgtatccctacgacctggtgcggtccccctggaagacgcaggaacacacccccacccccgatgaccacgtgttccgctggctggcctactcctatgcctccacacaccgcctcatgacagacgcccggaggagggtgtgccacacggaggacttccagaaggaggagggcactgtcaatggggcctcctggcacaccgtcgctggaagtctgaacgatttcagctaccttcatacaaactgcttcgaactgtccatctacgtgggctgtgataaatacccacatgagagccagctgcccgaggagtgggagaataaccgggaatctctgatcgtgttcatggagcaggttcatcgtggcattaaaggcttggtgagagattcacatggaaaaggaatcccaaacgccattatctccgtagaaggcattaaccatgacatccgaacagccaacgatggggattactggcgcctcctgaaccctggagagtatgtggtcacagcaaaggccgaaggtttcactgcatccaccaagaactgtatggttggctatgacatgggggccacaaggtgtgacttcacacttagcaaaaccaacatggccaggatccgagagatcatggagaagtttgggaagcagcccgtcagcctgccagccaggcggctgaagctgcgggggcggaagagacgacagcgtgggtgaccctcctgggcccttgagactcgtctgggacccatgcaaattaaaccaacctggtagtagctccatagtggactcactcactgttgtttcctctgtaattcaagaagtgcctggaagagagggtgcattgtgaggcaggtcccaaaagggaaggctggaggctgaggctgttttcttttctttgttcccatttatccaaataacttggacagagcagcagagaaaagctgatgggagtgagagaactcagcaagccaacctgggaatcagagagagaaggagaaggaggggagcctgtccgttcagagcctctggctgcatagaaaaggattctggtgcttcccctgtttgcgtggcagcaagggttccacgtgcatttgcaatttgcacagctaaaattgcagcatttccccagctgggctgtcccaaatgttaccatttgagatgctcccaggcgtcctaagagaatccaccctctctggccctgggacattgcaagctgctacaaataaattctgtgttcttttgacaatagcgtcattgccaagtgcacatcagtgagcctcttgaatctgtttagtctcctttttcaacaaaggagtgtgttcagaaaaggagagagaggctgagatcattcaggagtttgttgggcagcaagcatggagcttcttgcacaaattctgggtccataaacaacccccaaagtccctgctgatccagtagccctggaggttccccaggtagggagagccagaggtgccagccttcctgaagggccagaaaatttagcctggatctcctcttttacctgctaggactggaaagagccagaagtggggtggcctgaagccctctctctgcttgaggtattgcccctgtgtggaattgagtgctcatgggttggcctcatatcagcctgggagttatttttgatatgtagaatgccagatcttccagattaggctaaatgtaatgaaaacctcttaggattatctgtggagcatcagtttgggaagaattattgaattatcttgcaagaaaaaagtatgtctcactttttgttaatgttgctgcctcattgacctgggaaaaatgaaaaaaaaaaataaagcaaatggtaagacccttaaaaaaaaaaaaaaaaaaaaaaaaaaaaaaaaaaaaaaaaaaaaaaaa

SEQ ID NO: 14736 - DNA, 784 bp, Homo sapiens
agcatttgctcaggcagcctctctgggaagatgctgcttcttcctctccccctgctgctctttctcttgtgctccagagctgaagctggggagatcatcgggggcacagaatgcaagccacattcccgcccctacatggcctacctggaaattgtaacttccaacggtccctcaaaattttgtggtggtttccttataagacggaactttgtgctgacggctgctcattgtgcaggaaggtctataacagtcacccttggagcccataacataacagaggaagaagacacatggcagaagcttgaggttataaagcaattccgtcatccaaaatataacacttctactcttcaccacgatatcatgttactaaagttgaaggagaaagccagcctgaccctggctgtggggacactccccttcccatcacaattcaactttgtcccacctgggagaatgtgccgggtggctggctggggaagaacaggtgtgttgaagccgggctcagacactctgcaagaggtgaagctgagactcatggatccccaggcctgcagccacttcagagactttgaccacaatcttcagctgtgtgtgggcaatcccaggaagacaaaatctgcatttaagggagactctgggggccctcttctgtgtgctggggtggcccagggcatcgtatcctatggacggtcggatgcaaagccccctgctgtcttcacccgaatctcccattaccggccctggatcaaccagatcctgcaggcaaattaatcctggatcc

SEQ ID NO: 14737 - DNA, 2096 bp, Homo sapiens
acagcgcaagccccacgccacgcgtcgctggtcccaggcagcgagtcgctcgcgcgccccgccgcccgcctggcgacagctccgccgcgcacgcacatggaggggagcgcgagccccccggaaaagccccgcgcccgccctgcggctgccgtgctgtgccggggcccggtagagccgctggtcttcctggccaactttgccttggtcctgcagggcccgctcaccacgcagtatctgtggcaccgcttcagcgccgacctcggctacaatggcacccgccaaagggggggctgcagcaaccgcagcgcggaccccaccatgcaggaagtggagacccttacctcccactggaccctctacatgaacgtgggcggcttcctggtggggctcttctcgtccaccctgctgggagcttggagcgacagtgtgggccgccgcccgctgctagtgctggcctcgctgggcctgctgctccaggccctagtgtccgtttttgtggtgcagctgcagctccacgtcggctacttcgtgctgggtcgcatcctttgtgccctcctcggcgacttcggtggccttctggctgctagctttgcgtccgtggcagatgtcagctccagtcgcagccgcaccttccggatggccctgctagaagccagcatcggggtggctgggatgctggcaagcctcctcgggggccactggctccgggcccagggttatgccaaccccttctggctggccttggccttgctgatagccatgactctctatgcagctttctgctttggtgagaccttaaaggagccaaagtccacccggctcttcacgttccgtcaccaccgatccattgtccagctctatgtggctcccgccccagagaagtccaggaaacatttagccctctactcactggccatcttcgtggtgatcactgtgcactttggggcccaggacatcttaaccctttatgaactaagcacacccctctgctgggactccaaactaatcggctatggttctgcagctcagcatctcccctacctcaccagcctgctggccctgaagctcctgcagtactgcctggccgatgcctgggtagctgagatcggcctggccttcaacatcctggggatggtggtctttgcctttgccactatcacgcctctcatgttcacaggatatgggttgcttttcctgtcattagtcatcacacctgtcatccgggctaaactctccaagctggtgagagagacagagcagggtgctctcttttctgctgtggcctgtgtgaatagcctggccatgctgacggcctccggcatcttcaactcactctacccagccactctgaactttatgaaggggttccccttcctcctgggagctggcctcctgctcatcccggctgttctgattgggatgctggaaaaggctgatcctcacctcgagttccagcagtttccccagagcccctgatctgcctggaccagaagacagagggcaagaggagcaaagtgaacaccaagcaactggaggtctgcagctggaagcccagcccacagcaggacaagcaactcttgtctaagggcagtgctctctttggacgaggtagtcaagagagaccaaggcaccaccccatccacagctgacccagcctctgtctaggatctagaatcataacccacacaggcccactgcaggacaggtggcagaggagctatttgggacaggagtcagttctccctttctgctatccatcacttataaccccacaggccagaggagaggtcctgagagaggtgacacttcggggaccagaggcagcacgagggctggcatctctccttccagcccaaactgcacagccccaaccaggttcccaacacgtgtagcagtcatcagccattccttaacaatgaatgtggtacctggttagtgccagccttgggaaggagggagggaggtaagaggggcttggtgatctctggaggaagagtgttgcctttgctgtggttggggaatcgatccttggctatggcctacccactcccctggctgaagagtgccaatcattacaaatcagcttcagcaaactg

SEQ ID NO: 14738 - DNA, 6492 bp, Homo sapiens
ggggggtctgctctgtgcggtgaagcttctcttcttggcacctgcctggcatcggaagagggccccttctccctccctgggcttttatgtggacactgtaatgcctcagttttctttctttctttttgtttttgacacagggtctcactctatcacccaagctggagtgcagtggcaccatcttagctcaccgcagcctcaaactccccagctcgggtgattcttcctgcctcagcctcctgagtagtagcagctgggaccacagacgtctgccaccaagcccagctgcaccgccagttccggggagggccctgggccagcggctgtccgccccccctcctttataaagtcctggcctcgggacagcccgcacagctgcccagcctgcggagacgggacagccctgtcccactcactctttcccctgctgctcctgccggcagctcagctggaaccatgggaggccgcgtctttctcgtctttctcgcattctgtgtctggctgactctgccgggagctgaaacccaggactccaggggctgtgcccggtggtgccctcaggactcctcgtgtgtcaatgccaccgcctgtcgctgcaatccagggttcagctctttttctgagatcatcaccacccccatggagacttgtgacgacatcaacgagtgtgcaacactgtcgaaagtgtcatgcggaaaattctcggactgctggaacacagaggggagctacgactgcgtgtgcagcccaggatatgagcctgtttctggggcaaaaacattcaagaatgagagcgagaacacgtgtcaagatgtggacgagtgcagctccgggcagcatcagtgtgacagctccaccgtctgcttcaacaccgtgggttcatacagctgccgctgccgcccaggctggaagcccagacacggaatcccgaataaccaaaaggacactgtctgtgaagatatgactttctccacctggaccccgccccctggagtccacagccagacgctttcccgattcttcgacaaagtccaggacctgggcagagactacaagccaggcttggccaataacaccatccagagcatcttacaggcgctggatgagctgctggaggcccctggggacctggagaccctgccccgcttacagcagcactgtgtggccagtcacctgctggatggcctagaggatgtcctcagaggcctgagcaagaacctttccaatgggctgttgaacttcagttatcctgcaggcacagaattgtccctggaggtgcagaagcaagtagacaggagtgtcaccttgagacagaatcaggcagtgatgcagctcgactggaatcaggcacagaaatctggtgacccaggcccttctgtggtgggccttgtctccattccagggatgggcaagttgctggctgaggcccctctggtcctggaacctgagaagcagatgcttctgcatgagacacaccagggcttgctgcaggacggctcccccatcctgctctcagatgtgatctctgcctttctgagcaacaacgacacccaaaacctcagctccccagttaccttcaccttctcccaccgttcagtgatcccgagacagaaggtgctctgtgtcttctgggagcatggccagaatggatgtggtcactgggccaccacaggctgcagcacaataggcaccagagacaccagcaccatctgccgttgcacccacctgagcagctttgccgtcctcatggcccactacgatgtgcaggaggaggatcccgtgctgactgtcatcacctacatggggctgagcgtctctctgctgtgcctcctcctggcggccctcacttttctcctgtgtaaagccatccagaacaccagcacctcactgcatctgcagctctcgctctgcctcttcctggcccacctcctcttcctcgtggcaattgatcaaaccggacacaaggtgctgtgctccatcatcgccggtaccttgcactatctctacctggccaccttgacctggatgctgctggaggccctgtacctcttcctcactgcacggaacctgacggtggtcaactactcaagcatcaacagattcatgaagaagctcatgttccctgtgggctacggagtcccagctgtgacagtggccatttctgcagcctccaggcctcacctttatggaacaccttcccgctgctggctccaaccagaaaagggatttatatggggcttccttggacctgtctgcgccatcttctctgtgaatttagttctctttctggtgactctctggattttgaaaaacagactctcctccctcaatagtgaagtgtccaccctccggaacacaaggatgctggcatttaaagcgacagctcagctgttcatcctgggctgcacgtggtgtctgggcatcttgcaggtgggtccggctgcccgggtcatggcctacctcttcaccatcatcaacagcctgcagggtgtcttcatcttcctggtgtactgcctcctcagccagcaggtccgggagcaatatgggaaatggtccaaagggatcaggaaattgaaaactgagtctgagatgcacacactctccagcagtgctaaggctgacacctccaaacccagcacggttaactagaaaaatcttctgaataagatcttccctctttgcccgtggaaaatctgaacaatctttgagccatctagaggggaaagaaaagactttgttctgtgtgtttcaagaaattcaccatgtcagcaatatgaaggatgttatggaaggcgtgctaggcattcaattcctgcagaaaccggaaatcttccatgccctgcaatgtgctcatcaaactctcagcatatggacggccagctgtggcccatatcttggtcactctgaagcacaatatttatgaagctatagaacgttaagacctctttcacagcctctccttcctacaaagactcctccaaatcttaaaatgaagcaggaaaacgagcctaagaggactttcataccgacaacatctgaaaggactagaatgttcacaccacgatctggatttcttaattttttgtttttgtttttgttgttctctagttctacgggtttgattatttagtcatgtgaaaaatattgattactcacacatagatcaagagagacacggctcctgccttcatggagcttttaggggaaaatgaagtggctcttgcagctagagttgactcagaagccgaaattcctagaaatcaggtttctactgctaggcaattgaagtataaactattttataaacactgtcttctttcgtcttcacaccaacatgcagaaaagtttctaatctcagatcggggatgtgcaacaaattccatttcaaaggaatgacctgcaaaactcctaaatattccaagcaaatgcccttaaccctgtctgttatctgctttccttgaacagaaattctacatgaccataaaacctcgaagatgggtatggcacagttcatgccctgtaatcctagcactttgggagggtgaggcaggaggatggctcaagcccaggagtttgagaccagtgtgggcaacagagtgagaaccatctctacccaaaaaaaaaattaaaaattagccaagcatggtgatgatataggagttaaggagaaatcatttaggcaaatagcaagggtaggaagtcctcagtaaggttttccatttaatgaaaagcagcccccaaaatcattttcttttctaacaaagaacagcctgtaaaatcgagctgcagacatagacaagcaagctggaagcttccacgggtgaatgccggcagctgtgccaataggaaaaagctacctagactaggcatgtccaaaatggcggctccaagttcccttctctttgccagccatgtgtacagtaaaaagcaggcaacatagtgtcagccaaagctcatttgcataataagattagggtggggtggccagctcacataggggtaggccctaggtaaatcagacaccgccttctcaagcctgtctataaaatctggtacactatgacgagggtcagatttcccattcagacgcccctctcccatgcaagagaaagagctgttctcctttctctttcttttgcctattaaacctctgctcctggccaggcacagtggctcacgcctataatcccagcactttgggaggctgaggtggtcagatcacctaaggtcaggagttcaagaccagcctggtcaacatggtgaaatcttgtctctagtaaaaatacaaaaatatatgaaatctcacatagatgataatattaagttccaaaagcaactcaacctggtagattctaattttttttgaggcagggtcttgctttgtcacccatgctggagtacaatggcacaaacactgctcactgcagcctcgacctcccaaggcctaagcaatcctcctgcctcagtccccctccaggtatttgaaactacaggtgtgtaccaccacaccgggctaatttttgtattttttgtagagacgtgggtctcactatgctgcccaggctcaggtcttaatctcctgagctcaggcaatccgcaggcctcagcctccctaagtgcggggattacaggcttgagccactgcacctagcctctatttgttttacaaaagagaaattgagatcctgaatgttaagtgacttgcctgaggccatcccactaacaggagccagggttaggattcaaaccccatccaactggtcccagagctggagcttcttgcactgccctacactacctaccatctccatcctctgggcacctttttataagaaccaaaacattacagagcattgctttgtcaactcagctgggaacatttcccagtgcaactcacatttttcactgctctgtgcctgtccgtataagctcaatgagtattgatttaggggctttggagaactttgaatgctaccccccaagtaaccattgttggcaacctggtacctctacttttagccatttctccttctctataaatagtgcagaagtaacccacttggtaacaggcatccttgccaagcctccaccactaggtcagtgtaagaattaaagaaagaggaaagaaacacaaaaagtggcttgatggttaagacaggtttattttagagaaaacacacctgagaggggctgctggctgaattaggttagagtcttttctacagactaagagtgtttaaggatttagggtgggagagtttcttagaggcttggactgcttctgtgttttttttgttgtgcttatatgggagggagagtggtgtgtttgcttttatacatttttctgcagctgtaggcataccccccaagtctgcttttagcttccctattttagtgcacctggagggaaaggaatgtgcttattaaggcccactgttttactggggcccattgtatgagggtgaagtttggcagttacccaagagacttttcctccaccttcctctgtgcccgagctgttttatctgcattttactgtctgctttttttggctgcttatagtttttaaaaaagtaatttccttaaatccagaaggctaaaaatgaagctgaaacttaaagtggcggtgtttgtccaaaataacggggctcctgctctgccagtcagtaccctcaagtcactcctgatcctcaacctccatgcctaaggctggttcaagagaccacataatatctgccttttattacatacatgatgggtgcatgggattctgcgtgccctttgcttgatatagactgctaaggtgagatggggaatatcagagtcagctgctgcttgaggaagcagaacacacagctggaggcttggaacatgtgggtccctatgagtgtagagcccatatccccatagagtctacctagagcaggggtcgccaaatgttttcttaaagagcctgatagtgtatatgttaggctttgtgagccaggtatttacagcaactcaattctaccactgtggtatgaaaacagctatagacaatcataaatgaatgatcatggctatgttttaataaaactttacagacactgaacttgaacttccattgtgatatgaaaacagctatagacaatcataaatgaatgatcatggctatgttttaataaaactttatggacactgagcttgaacttcatatatcagtcatgtgacacaaaatatcattcttctttttatttgttttcacccatttgaaaaatgtaaaaactattcttagctgtacagaaacagatggtgggtcagatttgactcactgcccatagtttccagaccatgatgttcaggttcatggaagcacttcactctacactaatttattcatccattcatcacatatgtgatgagcacatacagacacacctcagagatattgcaggctccactccagatcaccacaataatgtgaatattgcaataaagcaagtcatacacatt

SEQ ID NO: 14739 - DNA, 6459 bp, Homo sapiens
ggggggtctgctctgtgcggtgaagcttctcttcttggcacctgcctggcatcggaagagggccccttctccctccctgggcttttatgtggacactgtaatgcctcagttttctttctttctttttgtttttgacacagggtctcactctatcacccaagctggagtgcagtggcaccatcttagctcaccgcagcctcaaactccccagctcgggtgattcttcctgcctcagcctcctgagtagtagcagctgggaccacagacgtctgccaccaagcccagctgcaccgccagttccggggagggccctgggccagcggctgtccgccccccctcctttataaagtcctggcctcgggacagcccgcacagctgcccagcctgcggagacgggacagccctgtcccactcactctttcccctgctgctcctgccggcagctcagctggaaccatgggaggccgcgtctttctcgtctttctcgcattctgtgtctggctgactctgccgggagctgaaacccaggactccaggggctgtgcccggtggtgccctcaggactcctcgtgtgtcaatgccaccgcctgtcgctgcaatccagggttcagctctttttctgagatcatcaccacccccatggagacttgtgacgacatcaacgagtgtgcaacactgtcgaaagtgtcatgcggaaaattctcggactgctggaacacagaggggagctacgactgcgtgtgcagcccaggatatgagcctgtttctggggcaaaaacattcaagaatgagagcgagaacacgtgtcaagatgtggacgagtgcagctccgggcagcatcagtgtgacagctccaccgtctgcttcaacaccgtgggttcatacagctgccgctgccgcccaggctggaagcccagacacggaatcccgaataaccaaaaggacactgtctgtgaagatatgactttctccacctggaccccgccccctggagtccacagccagacgctttcccgattcttcgacaaagtccaggacctgggcagagactacaagccaggcttggccaataacaccatccagagcatcttacaggcgctggatgagctgctggaggcccctggggacctggagaccctgccccgcttacagcagcactgtgtggccagtcacctgctggatggcctagaggatgtcctcagaggcctgagcaagaacctttccaatgggctgttgaacttcagttatcctgcaggcacagaattgtccctggaggtgcagaagcaagtagacaggagtgtcaccttgagacagaatcaggcagtgatgcagctcgactggaatcaggcacagaaatctggtgacccagggatgggcaagttgctggctgaggcccctctggtcctggaacctgagaagcagatgcttctgcatgagacacaccagggcttgctgcaggacggctcccccatcctgctctcagatgtgatctctgcctttctgagcaacaacgacacccaaaacctcagctccccagttaccttcaccttctcccaccgttcagtgatcccgagacagaaggtgctctgtgtcttctgggagcatggccagaatggatgtggtcactgggccaccacaggctgcagcacaataggcaccagagacaccagcaccatctgccgttgcacccacctgagcagctttgccgtcctcatggcccactacgatgtgcaggaggaggatcccgtgctgactgtcatcacctacatggggctgagcgtctctctgctgtgcctcctcctggcggccctcacttttctcctgtgtaaagccatccagaacaccagcacctcactgcatctgcagctctcgctctgcctcttcctggcccacctcctcttcctcgtggcaattgatcaaaccggacacaaggtgctgtgctccatcatcgccggtaccttgcactatctctacctggccaccttgacctggatgctgctggaggccctgtacctcttcctcactgcacggaacctgacggtggtcaactactcaagcatcaacagattcatgaagaagctcatgttccctgtgggctacggagtcccagctgtgacagtggccatttctgcagcctccaggcctcacctttatggaacaccttcccgctgctggctccaaccagaaaagggatttatatggggcttccttggacctgtctgcgccatcttctctgtgaatttagttctctttctggtgactctctggattttgaaaaacagactctcctccctcaatagtgaagtgtccaccctccggaacacaaggatgctggcatttaaagcgacagctcagctgttcatcctgggctgcacgtggtgtctgggcatcttgcaggtgggtccggctgcccgggtcatggcctacctcttcaccatcatcaacagcctgcagggtgtcttcatcttcctggtgtactgcctcctcagccagcaggtccgggagcaatatgggaaatggtccaaagggatcaggaaattgaaaactgagtctgagatgcacacactctccagcagtgctaaggctgacacctccaaacccagcacggttaactagaaaaatcttctgaataagatcttccctctttgcccgtggaaaatctgaacaatctttgagccatctagaggggaaagaaaagactttgttctgtgtgtttcaagaaattcaccatgtcagcaatatgaaggatgttatggaaggcgtgctaggcattcaattcctgcagaaaccggaaatcttccatgccctgcaatgtgctcatcaaactctcagcatatggacggccagctgtggcccatatcttggtcactctgaagcacaatatttatgaagctatagaacgttaagacctctttcacagcctctccttcctacaaagactcctccaaatcttaaaatgaagcaggaaaacgagcctaagaggactttcataccgacaacatctgaaaggactagaatgttcacaccacgatctggatttcttaattttttgtttttgtttttgttgttctctagttctacgggtttgattatttagtcatgtgaaaaatattgattactcacacatagatcaagagagacacggctcctgccttcatggagcttttaggggaaaatgaagtggctcttgcagctagagttgactcagaagccgaaattcctagaaatcaggtttctactgctaggcaattgaagtataaactattttataaacactgtcttctttcgtcttcacaccaacatgcagaaaagtttctaatctcagatcggggatgtgcaacaaattccatttcaaaggaatgacctgcaaaactcctaaatattccaagcaaatgcccttaaccctgtctgttatctgctttccttgaacagaaattctacatgaccataaaacctcgaagatgggtatggcacagttcatgccctgtaatcctagcactttgggagggtgaggcaggaggatggctcaagcccaggagtttgagaccagtgtgggcaacagagtgagaaccatctctacccaaaaaaaaaattaaaaattagccaagcatggtgatgatataggagttaaggagaaatcatttaggcaaatagcaagggtaggaagtcctcagtaaggttttccatttaatgaaaagcagcccccaaaatcattttcttttctaacaaagaacagcctgtaaaatcgagctgcagacatagacaagcaagctggaagcttccacgggtgaatgccggcagctgtgccaataggaaaaagctacctagactaggcatgtccaaaatggcggctccaagttcccttctctttgccagccatgtgtacagtaaaaagcaggcaacatagtgtcagccaaagctcatttgcataataagattagggtggggtggccagctcacataggggtaggccctaggtaaatcagacaccgccttctcaagcctgtctataaaatctggtacactatgacgagggtcagatttcccattcagacgcccctctcccatgcaagagaaagagctgttctcctttctctttcttttgcctattaaacctctgctcctggccaggcacagtggctcacgcctataatcccagcactttgggaggctgaggtggtcagatcacctaaggtcaggagttcaagaccagcctggtcaacatggtgaaatcttgtctctagtaaaaatacaaaaatatatgaaatctcacatagatgataatattaagttccaaaagcaactcaacctggtagattctaattttttttgaggcagggtcttgctttgtcacccatgctggagtacaatggcacaaacactgctcactgcagcctcgacctcccaaggcctaagcaatcctcctgcctcagtccccctccaggtatttgaaactacaggtgtgtaccaccacaccgggctaatttttgtattttttgtagagacgtgggtctcactatgctgcccaggctcaggtcttaatctcctgagctcaggcaatccgcaggcctcagcctccctaagtgcggggattacaggcttgagccactgcacctagcctctatttgttttacaaaagagaaattgagatcctgaatgttaagtgacttgcctgaggccatcccactaacaggagccagggttaggattcaaaccccatccaactggtcccagagctggagcttcttgcactgccctacactacctaccatctccatcctctgggcacctttttataagaaccaaaacattacagagcattgctttgtcaactcagctgggaacatttcccagtgcaactcacatttttcactgctctgtgcctgtccgtataagctcaatgagtattgatttaggggctttggagaactttgaatgctaccccccaagtaaccattgttggcaacctggtacctctacttttagccatttctccttctctataaatagtgcagaagtaacccacttggtaacaggcatccttgccaagcctccaccactaggtcagtgtaagaattaaagaaagaggaaagaaacacaaaaagtggcttgatggttaagacaggtttattttagagaaaacacacctgagaggggctgctggctgaattaggttagagtcttttctacagactaagagtgtttaaggatttagggtgggagagtttcttagaggcttggactgcttctgtgttttttttgttgtgcttatatgggagggagagtggtgtgtttgcttttatacatttttctgcagctgtaggcataccccccaagtctgcttttagcttccctattttagtgcacctggagggaaaggaatgtgcttattaaggcccactgttttactggggcccattgtatgagggtgaagtttggcagttacccaagagacttttcctccaccttcctctgtgcccgagctgttttatctgcattttactgtctgctttttttggctgcttatagtttttaaaaaagtaatttccttaaatccagaaggctaaaaatgaagctgaaacttaaagtggcggtgtttgtccaaaataacggggctcctgctctgccagtcagtaccctcaagtcactcctgatcctcaacctccatgcctaaggctggttcaagagaccacataatatctgccttttattacatacatgatgggtgcatgggattctgcgtgccctttgcttgatatagactgctaaggtgagatggggaatatcagagtcagctgctgcttgaggaagcagaacacacagctggaggcttggaacatgtgggtccctatgagtgtagagcccatatccccatagagtctacctagagcaggggtcgccaaatgttttcttaaagagcctgatagtgtatatgttaggctttgtgagccaggtatttacagcaactcaattctaccactgtggtatgaaaacagctatagacaatcataaatgaatgatcatggctatgttttaataaaactttacagacactgaacttgaacttccattgtgatatgaaaacagctatagacaatcataaatgaatgatcatggctatgttttaataaaactttatggacactgagcttgaacttcatatatcagtcatgtgacacaaaatatcattcttctttttatttgttttcacccatttgaaaaatgtaaaaactattcttagctgtacagaaacagatggtgggtcagatttgactcactgcccatagtttccagaccatgatgttcaggttcatggaagcacttcactctacactaatttattcatccattcatcacatatgtgatgagcacatacagacacacctcagagatattgcaggctccactccagatcaccacaataatgtgaatattgcaataaagcaagtcatacacatt

SEQ ID NO: 14740 - DNA, 2875 bp, Homo sapiens
gaaatgctttcggtaggcactccacggctgtgaagatggcggcggctgcgtggcttcaggtgttgcctgtcattcttctgcttctgggagctcacccgtcaccactgtcgtttttcagtgcgggaccggcaaccgtagctgctgccgaccggtccaaatggcacattccgataccgtcggggaaaaattattttagttttggaaagatcctcttcagaaataccactatcttcctgaagtttgatggagaaccttgtgacctgtctttgaatataacctggtatctgaaaagcgctgattgttacaatgaaatctataacttcaaggcagaagaagtagagttgtatttggaaaaacttaaggaaaaaagaggcttgtctgggaaatatcaaacatcatcaaaattgttccagaactgcagtgaactctttaaaacacagaccttttctggagattttatgcatcgactgcctcttttaggagaaaaacaggaggctaaggagaatggaacaaaccttacctttattggagacaaaaccgcaatgcatgaaccattgcaaacttggcaagatgcaccatacatttttattgtacatattggcatttcatcctcaaaggaatcatcaaaagaaaattcactgagtaatctttttaccatgactgttgaagtgaagggtccctatgaatacctcacacttgaagactatcccttgatgatttttttcatggtgatgtgtattgtatatgtcctgtttggtgttctgtggctggcatggtctgcctgctactggagagatctcctgagaattcagttttggattggtgctgtcatcttcctgggaatgcttgagaaagctgtcttctatgcggaatttcagaatatccgatacaaaggagaatctgtccagggtgctttgatccttgcagagctgctttcagcagtgaaacgctcactggctcgaaccctggtcatcatagtcagtctgggatatggcatcgtcaagccacgccttggagtcactcttcataaggttgtagtagcaggagccctctatcttttgttctctggcatggaaggggtcctcagagttactggggcccagactgatcttgcttccttggcctttatccccttggctttcctagacactgccttgtgctggtggatatttattagcctgactcaaacaatgaagctattaaaacttcggaggaacattgtaaaactctctttgtatcggcatttcaccaacacgcttattttggcagtggcagcatccattgtgtttatcatctggacaaccatgaagttcagaatagtgacatgtcagtcggactggcgggagctgtgggtagacgatgccatctggcgcttgctgttctccatgatcctctttgtcatcatggttctctggcgaccatctgcaaacaaccagaggtttgccttttcaccattgtctgaggaagaggaggaggatgaacaaaaggagcctatgctgaaagaaagctttgaaggaatgaaaatgagaagtaccaaacaagaacccaatggaaatagtaaagttaacaaagcacaggaagatgatttgaagtgggtagaagagaatgttccttcttctgtgacagatgtagcacttccagcccttctggattcagatgaggaacgaatgatcacacactttgaaaggtccaaaatggagtaaggaatgggaagatttgcagttaaagatggctaccatcagggaagagatcagcatctgtgtcagtcttctgtacggctccatgggattaaaggaagcaatgacatcctgatctgttccttgatctttgggcattggagttggcgagaggtgtcagaacaaagagaacatcttactgaaaacaagttcataagatgagaaaaatctacgagcttcttatttacaacactgctgccccctttcctcccagactctgacatggatgttcatgcaacttaagtgtgttgttcctgaactttctgtaatgtttcattttttaaatctgacaaactaaaaagtttaacgtcttctaaaagattgtcatcaacaccataatatgtaatctccaggagcaactgcctgtaatttttatttatttagggagttacataggtgatgggggaaattgttaactacctttcattttcctgggaagtcaaggttacatcttgcagaggttgttttgagaaaaaagggcccttctgagttaaggagccatagttctatcaatgatcaaaagaaaaaaaaaaaaaagagaaactgttgcagtatgattcagatcatttaaaaaagcaaaatcaagtgcaattttgtttacaaatggtgtatattaaagatttttctatttcagatgtactttaaagagaaatattagcttaactcttttgacatctgctattgtgacacatcccattgctggcaatgtggtgcacactccgaaacttttaactactgttttgtaagcctccaagggtggcattgcagggtccttaggcaatgttttgtttgcctttatgcagagaggtgctccaagtgctgtgattgagcaccgtgctagaggaactgtaatgcttcagaagttgtagcttatacaaaggaaacaggtcctgctggcttaatttaaacagttattgcatgaagtagcgtggaggccctggactgctgctcgttctttaggatggactgttctggtatctggtattggtttagagactgttaataagggacatcacaaggtgatgggattcatttgaagcactctatttctgttttaatgttttatccaattttgccttcccaagatttttgttctacataaaaagttcatgccactttttaatataaaaaaatttaac

SEQ ID NO: 14741 - DNA, 5330 bp, Homo sapiens
cagcgcgcggcaggcggcgagctcgggggccgcagaaaatgaaactgaagccgtggtcacgtgacaggacatgtagtatatagcaggctgccagcgactcctgctcttgcttctggatctgcagggcagtcccagcaggacccatggagtgtccttcgtgccagcatgtctccaaggaggaaacccccaagttctgcagccagtgcggagagaggctgcctcctgcagcccccatagcagattctgagaacaataactccacaatggcgtcggcctcggagggtgaaatggagtgtgggcaggagctgaaggaggaagggggcccgtgcttgttcccgggctcagacagttggcaagaaaaccccgaggagccctgttccaaagcctcctggaccgtccaagaaagcaaaaagaagaaaaggaagaagaaaaagaaggggaacaagtccgcttcctcagagctggcttccttgcccctttctcctgccagcccctgtcacctgactttgctttcaaacccgtggcctcaggacacagccctgccccacagccaagcccagcagagtggccccactggccagccgagccagcccccaggcacagccaccacgccactggagggtgacggcctctccgcgcccaccgaggttggcgacagccccctgcaggcccaggctttgggagaggcaggagtggccacaggaagtgaggctcagagcagcccgcaattccaggaccacacggaaggggaggaccaggacgcttccatcccctctgggggcagaggcctgtcccaggaggggaccggtccccccacctctgctggtgaaggccattctaggactgaagatgctgcccaggagctcctgttgcctgagtcaaaaggaggcagctctgagcccgggacagaactgcagaccaccgagcaacaggcaggggcctcagcctctatggcagttgatgctgtagctgagccagccaatgcagttaaaggggccgggaaggaaatgaaagagaagacccagagaatgaaacagccaccagcaaccactcctcctttcaaaacacactgccaggaagctgagaccaagaccaaggacgagatggctgctgctgaagaaaaagtcggtaagaatgaacaaggggagcctgaagacctcaagaagccagaggggaagaacagaagtgcagctgctgtgaaaaacgagaaggagcaaaaaaaccaggaagcagatgtccaggaagtgaaggcaagcacgctgagcccgggtggaggagtcaccgtgttcttccacgccatcatctctcttcatttcccattcaatcctgacctccataaagtcttcatcagaggaggagaagaatttggggagtcaaaatgggacagcaatatctgtgagctgcactacaccagagacttgggtcatgaccgcgttcttgttgaaggcattgtctgcatttccaagaagcacctagataaatacattccttacaagtacgtcatttataatggggaatcttttgagtatgagttcatttacaagcaccagcagaagaagggcgagtacgtcaaccgctgtctgttcataaaatcttcacttctgggctcaggagactggcatcagtactatgacatagtttatatgaagcctcatgggagactccagaaagtcatgaaccacatcacagacgggccgaggaaggacctggtgaaggggaagcagattgccgctgcgctcatgctggacagcaccttcagcatcctgcagacctgggacaccatcaacctgaacagcttcttcacccagttcgagcagttttgctttgtcctgcaacagcctatgatttatgaaggacaggcacagctgtggaccgatttgcagtacagggagaaagaggtgaagagatacctgtggcaacatctgaaaaaacacgtggtaccattgccggacggaaaaagcacggactttttgcctgtggactgcccagtgaggagtaaactgaaaacaggcctgattgtcctttttgtagtggaaaaaattgagcttttattagaaggcagcctggactggttgtgtcacctcctaacctcagatgccagctcaccagatgagtttcaccgtgacctaagccacatccttgggatacctcagagctggcggctgtacctggtgaacctgtgccaaagatgcatggacacaaggacgtacacctggctgggcgccctgcctgtcctgcactgctgtatggagctggccccgcggcacaaggatgcctggagacagcctgaggacacctgggccgctctggagggactctccttctcaccgttccgggaacaaatgctagatacgagttccctacttcagtttatgagagagaagcagcatttgctgagcatagacgagcctctcttccggtcctggtttagtctgctacctctgagtcacctggttatgtatatggaaaacttcattgagcacctgggtcgttttcctgctcatatcctggactgtctttcagggatttactaccggcttccgggacttgagcaagtcttgaatacgcaggatgttcaggatgttcagaacgttcagaacattttagaaatgctgttgcgactcctggacacttaccgggacaagattcccgaggaggccttgtcaccatcctacctgactgtgtgtctgaaactgcatgaagccatctgcagcagcacaaagctacttaagttttacgagctgccagccttatctgccgagattgtctgcagaatgattagacttctatctctggtggattctgcaggacagagagatgaaactggaaataattcagtccaaacagtcttccaagggacccttgctgctacgaaaaggtggctccgagaagtttttacaaagaacatgctcacatcttcaggtgcctcattcacatacgtcaaggaaattgaggtctggaggcggctggtggaaatccaattccccgcggagcatggctggaaggagtcgttgctgggagacatggaatggaggctcacaaaggaggaacccctctcccagatcactgcctactgcaatagttgctgggacaccaaaggcttagaggacagtgtggccaagaccttcgagaaatgcatcattgaagccgtgagctcagcctgccaggtgaacaatctctcctcctgggaaacggattcgggctcacagctgtgttctgccatgacccagctaagggctatgaagcacccgctgggtctcagctcctccgctaactcagagattgggaagtgggcaccctcctccctcgccaagggcaatggcgctgaaatctagttctctccggattcctcagtgtgctgcacagtccctgctgctcgcaccatcctgcatgtgttccatatggaatcacggccgtgcgcgtgtggcacaagtcacacgggcttgcaggccgttcctcagatggccctgtcatcactgtggctgctggtttgattgattgttaacacttgctcagtaggtgtgcgggaagagactccaaaggttgacagaacatttatggaagcaaaatatgtgaaatggaaaattgtatcaatttatttagctcttttcggcaaaggggaagagattgtgcccccctgtctcccaggaacagtctcgcaggcaatgccacatgaggaagctccctgctggccacggctgccctgctcacatttcctaattggacacttaacccctgtacaagcacagccttgcggccacaggggaagtccagaaacattgaggtcattgaattccggggaccaaggggttctaattttttaagtgactgatacctttgataaggttttcctttccctttttcgttaactctttgttgagatattgttcgtatgccatacggtacatctgtcaaaagttccagttcagcaggttttggggtagtcacagatatgtacagtcatcaccacagttaatgacagagcattttcatcacttcaaagagaaacccggcccctttagccatcatcctcctcccctctagtcacccactcccctctgcaggcataaacaattgctgaacataaacaactgcttctgtggctttctctgttctgactgtcatatgaatggaatcatatcatatgtggccttttgggtatggcttatttcactgagcataatgtttttttgttgttggtggtggtggttgtttgttgtttttgagacagagtttcactctttttgcccaggctggagtgcaatggtgcgatcctggctcaccgcaaccgctgcctcccgggttcaagtgattctcctgcctcagcctcccaagtgctggaattacagctactttttgtttaaagagtcttttaattgtttaaagaacaatgtgccgccacactcggttccttttgtatttttagaagagacagggtttctccatgttggtcaggctggtctcgaactcccgacctcaggtgatccacccaccttggcctcccgaagtgccgagattacaggtgtgagccaccgcgcccggccgagcataatgttttgaaagaccgctcaggctggacacggttgctcacgcctgtaatcacggcactttgggagcccaggagttcaagacaagcctgggtaacagagtaagaccctgtctctataaaaactaaaaaataaacaaaaaaaattagccaggcatggccgggcacacctgtggtcccagctacttgggaggctgaggtgggaggctcccttgggcccagaaggtcaaggcagcagtgagccatgatcacaccactgcacttcaacctgggggacagagcaagaccctgtctcaaaaagcaataacaacaaaagtccatccatattgtagcttgtgtccgtttacgttaagtattccttacccaaaatgcttgagaccagaagtgttttggatttcagatgttttcaaattttggaatatttgcatttacataatgagatgtcttccagatgggacccagagtctaaccacaaaattcacttgtttcatatacatcttatacacatagcctgaaggtaattttatacaatatttttaacaattttgtgcatgagacaaagtttgtattaagtatttgtatgttgaatttttcacttgtggcatcattatactcaaaaagtttggattttgtagtattttggatttggggattaggaatgctcaacctatatttcatttttttccatggccaaatattccccgtttatccatgtgtccattgacggccatctatgttgcttcttcggctattataaatctgctgatacaaaaaaaaaaaaaaa

SEQ ID NO: 14742 - DNA, 2072 bp, Homo sapiens
ttattgtggtttgtccgttccgagcgctccgcagaacagtcctccctgtaagagcctaaccattgccagggaaacctgccctgggcgctcccttcattagcagtattttttttaaattaatctgattaataattatttttcccccatttaattttttttcctcccaggtggagttgccgaagctgggggcagctggggagggtggggatgggaggggagagacagaagttgagggcatctctctcttccttcccgaccctctggcccccaaggggcaggaggaatgcaggagcaggagttgagcttgggagctgcagatgcctccgcccctcctctctcccaggctcttcctcctgcccccttcttgcaactctccttaattttgtttggcttttggatgattataattatttttatttttgaatttatataaagtatatgtgtgtgtgtgtggagctgagacaggctcggcagcggcacagaatgagggaagacgagaaagagagtgggagagagagaggcagagagggagagagggagagtgacagcagcgctcggacgtcctccccaacgtcgccctcaattccaccgcctatgatccagtgaggcatttctcgacctatggagcggccgttgcccagaaccggatctactcgactcccttttattcgccacaggagaatgtcgtgttcagttccagccgggggccgtatgactatggatctaattccttttaccaggagaaagacatgctctcaaactgcagacaaaacaccttaggacataacacacagacctcaatcgctcaggattttagttctgagcagggcaggactgcgccccaggaccagaaagccagtatccagatttacccctggatgcagcgaatgaattcgcacagtggggtcggctacggagcggaccggaggcgcggccgccagatctactcgcggtaccagaccctggaactggagaaggaatttcacttcaatcgctacctaacgcggcgccggcgcatcgagatcgccaacgcgctttgcctgaccgagcgacagatcaaaatctggttccagaaccgccggatgaagtggaaaaaagaatctaatctcacatccactctctcggggggcggcggaggggccaccgccgacagcctgggcggaaaagaggaaaagcgggaagagacagaagaggagaagcagaaagagtgaccaggactgtccctgccacccctctctccctttctccctcgctccccaccaactctcccctaatcacacactctgtatttatcactggcacaattgatgtgttttgattccctaaaacaaaattagggagtcaaacgtggacctgaaagtcagctctggaccccctccctcaccgcacaactctctttcaccacgcgcctcctcctcctcgctcccttgctagctcgttctcggcttgtctacaggcccttttccccgtccaggccttgggggctcggaccctgaactcagactctacagattgccctccaagtgaggacttggctcccccactccttcgacgcccccacccccgccccccgtgcagagagccggctcctgggcctgctggggcctctgctccagggcctcagggcccggcctggcagccggggagggccggaggcccaaggagggcgcgccttggccccacaccaacccccagggcctccccgcagtccctgcctagcccctctgccccagcaaatgcccagcccaggcaaattgtatttaaagaatcctgggggtcattatggcattttacaaactgtgaccgtttctgtgtgaagatttttagctgtatttgtggtctctgtatttatatttatgtttagcaccgtcagtgttcctatccaatttcaaaaaaggaaaaaaaagagggaaaattacaaaaagagagaaaaaaagtgaatgacgtttgtttagccagtaggagaaaataaataaataaataaatcccttcgtgttaccctcctgtataaatccaacctctgggtccgttctcgaatatttaataaaactgatattatttttaaaacttta

SEQ ID NO: 14743 - DNA, 1681 bp, Homo sapiens
ttttgtctgtcctggattggagccgtccctataaccatctagttccgagtacaaactggagacagaaataaatattaaagaaatcatagaccgaccaggtaaaggcaaagggatgaattcctacttcactaacccttccttatcctgccacctcgccgggggccaggacgtcctccccaacgtcgccctcaattccaccgcctatgatccagtgaggcatttctcgacctatggagcggccgttgcccagaaccggatctactcgactcccttttattcgccacaggagaatgtcgtgttcagttccagccgggggccgtatgactatggatctaattccttttaccaggagaaagacatgctctcaaactgcagacaaaacaccttaggacataacacacagacctcaatcgctcaggattttagttctgagcagggcaggactgcgccccaggaccagaaagccagtatccagatttacccctggatgcagcgaatgaattcgcacagtggggtcggctacggagcggaccggaggcgcggccgccagatctactcgcggtaccagaccctggaactggagaaggaatttcacttcaatcgctacctaacgcggcgccggcgcatcgagatcgccaacgcgctttgcctgaccgagcgacagatcaaaatctggttccagaaccgccggatgaagtggaaaaaagaatctaatctcacatccactctctcggggggcggcggaggggccaccgccgacagcctgggcggaaaagaggaaaagcgggaagagacagaagaggagaagcagaaagagtgaccaggactgtccctgccacccctctctccctttctccctcgctccccaccaactctcccctaatcacacactctgtatttatcactggcacaattgatgtgttttgattccctaaaacaaaattagggagtcaaacgtggacctgaaagtcagctctggaccccctccctcaccgcacaactctctttcaccacgcgcctcctcctcctcgctcccttgctagctcgttctcggcttgtctacaggcccttttccccgtccaggccttgggggctcggaccctgaactcagactctacagattgccctccaagtgaggacttggctcccccactccttcgacgcccccacccccgccccccgtgcagagagccggctcctgggcctgctggggcctctgctccagggcctcagggcccggcctggcagccggggagggccggaggcccaaggagggcgcgccttggccccacaccaacccccagggcctccccgcagtccctgcctagcccctctgccccagcaaatgcccagcccaggcaaattgtatttaaagaatcctgggggtcattatggcattttacaaactgtgaccgtttctgtgtgaagatttttagctgtatttgtggtctctgtatttatatttatgtttagcaccgtcagtgttcctatccaatttcaaaaaaggaaaaaaaagagggaaaattacaaaaagagagaaaaaaagtgaatgacgtttgtttagccagtaggagaaaataaataaataaataaatcccttcgtgttaccctcctgtataaatccaacctctgggtccgttctcgaatatttaataaaactgatattatttttaaaacttta

SEQ ID NO: 14744 - DNA, 1696 bp, Homo sapiens
gcacgagggtgatgaaggcctacgagtgcggcgcggcctgaaggggcacgcgggggacctgcaaagctagtgaggggcggggcaggcggcgcggtgggggcgggccgagcccggaggccagatgagcggacacagccccacgcgcggggccatgcaggtggccatgaacggtaaggcccgcaaagaggcggtgcagactgcggctaaggaactcctcaagttcgtgaaccggagtccctctcctttccatgctgtggctgaatgccgcaaccgccttctccaggctggcttcagtgaactcaaggagactgagaaatggaatattaagcccgagagcaagtacttcatgaccaggaactcctccaccatcatagcttttgctgtagggggccagtacgttcctggcaatggcttcagcctcatcggggcccacacggacagcccctgcctccgggtgaaacgtcggtctcgccgcagccaggtgggcttccagcaagtcggtgtggagacctatggtggtgggatctggagcacctggtttgaccgtgacctgactctggctggacgcgtcattgtcaagtgccctacctcaggtcggctggagcagcagctggtgcacgtggagcggcccattcttcgcatcccacacctggccatccatctgcagcgaaatatcaacgagaactttgggcccaacacagagatgcatctagtccccattcttgccacagccatccaggaggagctggagaaggggactcctgagccagggcctctcaatgctgtggatgagcggcaccattcggtcctcatgtccctgctctgtgcccatctggggctgagccccaaggacatagtggagatggagctctgccttgcagacacccagcctgcggtcttgggtggtgcctatgatgagttcatctttgctcctcggctggacaatctgcacagctgcttctgtgccctgcaggccttgatagattcctgtgcaggccctggctccctggccacagagcctcacgtgcgcatggtcacactctatgacaacgaagaggtggggtctgagagtgcacagggagcacagtcactgctgacagagctggtgctgcggcggatctcagcctcgtgccagcacccgacagccttcgaggaagccatacccaagtccttcatgatcagcgcagacatggcccatgctgtgcatcccaactacctggacaagcatgaggagaaccaccggcctttattccacaagggccccgtgatcaaggtgaacagcaagcaacgctatgcttcaaacgcggtgtcagaggccctgatccgagaggtggccaacaaagtcaaggtccccctgcaggatctcatggtccggaatgacaccccctgtggaaccaccattggacctatcttggcttctcggctggggctgcgggtgctggatttaggcagcccccaactggccatgcactctatccgggagatggcctgcaccacaggagtcctccagaccctcaccctcttcaagggcttctttgagctgttcccttctctaagccataatctcttagtggattgagccctcttggaaagacttctctgccatccctttgcacctgagaggggaagttctcagctgagctgaagctggattattaaagtggattgtcactcagaaaaaaaaaaaaaaaaaaaa

SEQ ID NO: 14745 - DNA, 3088 bp, Homo sapiens
gctggaagggtttctttggccctgagtgaagagagacccagagggaacactgaggtgcctgcccaaccactctgtcccggtttccttcagcaggaccaggtgagagaagccatgctggtcgttcagatgcctttctcctttcccatggcccacttcatcctctttgtctttacggtttccactatatttcacgttcagcagcggctagcgaagattcaagccatgtgggagttaccggtgcagataccagtgctagcctcaacatcaaaggcactgggacccagccagctcagggggatgtggacgatcaatgcaataggccgcctggggaaccagatgggcgagtacgccacactgtacgccctggccaagatgaacgggcggcccgccttcatcccggcccagatgcacagcaccctggcccccatcttcagaatcaccctgccggtgctgcacagcgccacggccagcaggatcccctggcagaactaccacctgaacgactggatggaggaggaataccgccacttcccgggggagtacgtccgcttcaccggctacccctgctcctggaccttctaccaccacctccgccaggagatcctccaggagttcaccctgcacgaccacgtgcgggaggaggcccagaagttcctgcggggcctgcaggtgaacgggagccggccgggcacctttgtaggggtccatgttcgccgaggggactatgtccatgtcatgccaaaagtgtggaagggggtggtggccgaccggcgatacctacagcaggccctggactggttccgagctcgctacagctccctcatcttcgtggtcaccagtaatggcatggcctggtgtcgggagaacattgacacctcccacggtgatgtggtgtttgctggcgatggcattgagggctcacctgccaaagattttgctctactcacacagtgtaaccacaccatcatgaccattgggacgttcgggatctgggccgcatacctcacgggcggagacaccatctacctggccaattacaccctccccgactcccctttcctcaaaatctttaagccagaggcagccttcctgccggagtggacagggattgccgcagacctgtcccccttactcaagcactaatgctggcccattctttgagaccttttctccttctctgcctccctcaagatgagtgcccgggcatgagaagcacatggttccatgagcaggacccatctctcttctgtgaagatgcgttgggctgcaagtaacagaaatctcagtgaacagtggcctggcgtggtggctcatgcctgtaatgctcgcactttgggaggccagggtgggtggatcacttgaggtcaggagttcaagactagcctggccaacatggtgaaaccccatctcgactaaaaatacaaaaattagccaggcgtggtggtgcacacttgtaatcccagctactcgggaggctgaggcaagagaatcacttgaacccaggaggcggaggttgcagtgagccaagatggtgccgctgcactccagcctgggtgacacagcaagactccatctcaaaaaaaaaaaaagaaaaagaaatgaacgggttcaaagaccataatcatgcatatcacataagaccagaagtggcccaggtccagggtcagttaatttagcagctccacaaagtcatcagtcacctgagctccatccatcttcacatgctgtgctaccatttcttagctgtatcatcccatggtcccaaaagggctgctacacatccagccatcacatgcagataattcctttcaaaaacagcagaaagaggctcgttcttgtcttggtcccttttgaagaatgaatgaaaccttcctaagccttccagcaatttccccccaactccgatgggtaggaattgtcacatacccatgtgacccgataggaggcaaaagaaatgagacttctgggattagtttagcctcagattctgcagctgagaagttgatcagccacctctgaaggacatgcagcttgcagaaaattagggtggtgttaccaaggtgaaaaggggaaatggctttagagtagacaacagagatgccctgaggggttgtgtaggttgttcactgcaggaagtcccctggttaagaaggcaagtggggtttaaacagacccacagtctactcatcaaaccaggtgtccttggcattgtgtccacccagagagctcactgttttcttttctttttcttttctttttttttttttgagatggagtcttgctgcatcccccaggctggagtgcagtggcatgatcttggctcactgcagcctccgcctcccaggttcaggcgattctcctgcctcagcctcccgagtggctgggattgcaggtgcgtgccaccacgcccagctaattttgtacgtttagtggaaatggagtttcaccatgttggtcaggctggtctcaaactcctgacctcatgatccgccttcctcggcctcccaaggtgctgggattacaggtgttagccactgcgcccggccctagagctcactgttttctagttagtccatctggaagtggagcctttttccagtttgcacaaatgtgccatattggcttgtagctggcatgcatccaagtccataggtcctgcctcttcaatcctggctttctagggcctgggatgatcattgctagaactgagagaccagcctggctgagtgaacttcagggcgttccgttcattctttcagtaaatggttgcagcacatgttttacatgtcaggcagtgaaaccccccacagcagccttccctctcagaggatacatttgtaaccattacacagtcatcaaaggaataattttttttaatcaccagtgtgcatacagtcatggagctgggtattcccagctaccagggaggctgaggtgggaggattgcttgatgccaggagttagggaatatagtgcaccgtgattggacttgcgaatagccactgcactgcggcctggacgacgtagtgataccctgactcttataaataaataaatgaataaacacaattatgactttgcggatggg

SEQ ID NO: 14746 - DNA, 2993 bp, Homo sapiens
ggtggcgggtggctggcggttccgttaggtctgagggagcgatggcggtacgcgcgttgaagctgctgaccacactgctggctgtcgtggccgctgcctcccaagccgaggtcgagtccgaggcaggatggggcatggtgacgcctgatctgctcttcgccgaggggaccgcagcctacgcgcgcggggactggcccggggtggtcctgagcatggaacgggcgctgcgctcccgggcagccctccgcgcccttcgcctgcgctgccgcacccagtgtgccgccgacttcccgtgggagctggaccccgactggtcccccagcccggcccaggcctcgggcgccgccgccctgcgcgacctgagcttcttcgggggccttctgcgtcgcgctgcctgcctgcgccgctgcctcgggccgccggccgcccactcgctcagcgaagagatggagctggagttccgcaagcggagcccctacaactacctgcaggtcgcctacttcaagatcaacaagttggagaaagctgttgctgcagcacacaccttcttcgtgggcaatcctgagcacatggaaatgcagcagaacctagactattaccaaaccatgtctggagtgaaggaggccgacttcaaggatcttgagactcaaccccatatgcaagaatttcgactgggagtgcgactctactcagaggaacagccacaggaagctgtgccccacctagaggcggcgctgcaagaatactttgtggcctatgaggagtgccgtgccctctgcgaagggccctatgactacgatggctacaactaccttgagtacaacgctgacctcttccaggccatcacagatcattacatccaggtcctcaactgtaagcagaactgtgtcacggagcttgcttcccacccaagtcgagagaagccctttgaagacttcctcccatcgcattataattatctgcagtttgcctactataacattgggaattatacacaggctgttgaatgtgccaagacctatcttctcttcttccccaatgacgaggtgatgaaccaaaatttggcctattatgcagctatgcttggagaagaacacaccagatccatcggcccccgtgagagtgccaaggagtaccgacagcgaagcctactggaaaaagaactgcttttcttcgcttatgatgtttttggaattccctttgtggatccggattcatggactccaggagaagtgattcccaagagattgcaagagaaacagaagtcagaacgggaaacagccgtacgcatctcccaggagattgggaaccttatgaaggaaatcgagacccttgtggaagagaagaccaaggagtcactggatgtgagcagactgacccgggaaggtggccccctgctgtatgaaggcatcagtctcaccatgaactccaaactcctgaatggttcccagcgggtggtgatggacggcgtaatctctgaccacgagtgtcaggagctgcagagactgaccaatgtggcagcaacctcaggagatggctaccggggtcagacctccccacatactcccaatgaaaagttctatggtgtcactgtcttcaaagccctcaagctggggcaagaaggcaaagttcctctgcagagtgcccacctgtactacaacgtgacggagaaggtgcggcgcatcatggagtcctacttccgcctggatacgcccctctacttttcctactctcatctggtgtgccgcactgccatcgaagaggtccaggcagagaggaaggatgatagtcatccagtccacgtggacaactgcatcctgaatgccgagaccctcgtgtgtgtcaaagagcccccagcctacaccttccgcgactacagcgccatcctttacctaaatggggacttcgatggcggaaacttttatttcactgaactggatgccaagaccgtgacggcagaggtgcagcctcagtgtggaagagccgtgggattctcttcaggcactgaaaacccacatggagtgaaggctgtcaccagggggcagcgctgtgccatcgccctgtggttcaccctggaccctcgacacagcgagcgggtgagagcagctcgagcgggtgagagcagctggtgctgtggtgacccgttcccagagcgcccttggtttgcctttctcttccccaaatcccattgccagtggctgagacacgaaaggagcacttgggacaccagctccaacgccctgtcattatggtcacattgccttgtcctccctgggcctgctgtgaacgggatccaggtggggaaagaggtcaagacagggagcgatgctgagttcttggttccctccttgggccccacttcagctgtccttttccagagagtaggacctgctgggaaggagatgagcctggggccattaaggaaccttccttgtcccctgggaagtagcagctgagagatagcgagtgtctggagcggaggcctctctgaatgggcaggggtttgtccttgcaggacagggtgcaggcagatgacctggtgaagatgctcttcagcccagaagagatggtcctctcccaggagcagcccctggatgcccagcagggcccccccgaacctgcacaagagtctctctcaggcagtgaatcgaagcccaaggatgagctatgacagcgtccaggtcagacggatgggtgactagacccatggagaggaactcttctgcactctgagctggccagcccctcggggctgcagagcagtgagcctacatctgccactcagccgaggggaccctgctcacagccttctacatggtgctactgctcttggagtggacatgaccagacaccgcaccccctggatctggctgagggctcaggacacaggcccagccacccccaggggcctccacaggccgctgcataacagcgatacagtacttaagtgtctgtgtagacaaccaaagaataaatgattcatggtttttttt

SEQ ID NO: 14747 - DNA, 2210 bp, Homo sapiens
agcaatcctttctttcagctggagtgctcctcaggagccagccccacccttagaaaagatgttttccatgaggatcgtctgcctggtcctaagtgtggtgggcacagcatggactgcagatagtggtgaaggtgactttctagctgaaggaggaggcgtgcgtggcccaagggttgtggaaagacatcaatctgcctgcaaagattcagactggcccttctgctctgatgaagactggaactacaaatgcccttctggctgcaggatgaaagggttgattgatgaagtcaatcaagattttacaaacagaataaataagctcaaaaattcactatttgaatatcagaagaacaataaggattctcattcgttgaccactaatataatggaaattttgagaggcgatttttcctcagccaataaccgtgataatacctacaaccgagtgtcagaggatctgagaagcagaattgaagtcctgaagcgcaaagtcatagaaaaagtacagcatatccagcttctgcagaaaaatgttagagctcagttggttgatatgaaacgactggaggtggacattgatattaagatccgatcttgtcgagggtcatgcagtagggctttagctcgtgaagtagatctgaaggactatgaagatcagcagaagcaacttgaacaggtcattgccaaagacttacttccctctagagataggcaacacttaccactgataaaaatgaaaccagttccagacttggttcccggaaattttaagagccagcttcagaaggtacccccagagtggaaggcattaacagacatgccgcagatgagaatggagttagagagacctggtggaaatgagattactcgaggaggctccacctcttatggaaccggatcagagacggaaagccccaggaaccctagcagtgctggaagctggaactctgggagctctggacctggaagtactggaaaccgaaaccctgggagctctgggactggagggactgcaacctggaaacctgggagctctggacctggaagtactggaagctggaactctgggagctctggaactggaagtactggaaaccaaaaccctgggagccctagacctggtagtaccggaacctggaatcctggcagctctgaacgcggaagtgctgggcactggacctctgagagctctgtatctggtagtactggacaatggcactctgaatctggaagttttaggccagatagcccaggctctgggaacgcgaggcctaacaacccagactggggcacatttgaagaggtgtcaggaaatgtaagtccagggacaaggagagagtaccacacagaaaaactggtcacttctaaaggagataaagagctcaggactggtaaagagaaggtcacctctggtagcacaaccaccacgcgtcgttcatgctctaaaaccgttactaagactgttattggtcctgatggtcacaaagaagttaccaaagaagtggtgacctccgaagatggttctgactgtcccgaggcaatggatttaggcacattgtctggcataggtactctggatgggttccgccataggcaccctgatgaagctgccttcttcgacactgcctcaactggaaaaacattcccaggtttcttctcacctatgttaggagagtttgtcagtgagactgagtctaggggctcagaatctggcatcttcacaaatacaaaggaatccagttctcatcaccctgggatagctgaattcccttcccgtggtaaatcttcaagttacagcaaacaatttactagtagcacgagttacaacagaggagactccacatttgaaagcaagagctataaaatggcagatgaggccggaagtgaagccgatcatgaaggaacacatagcaccaagagaggccatgctaaatctcgccctgtcagaggtatccacacttctcctttggggaagccttccctgtccccctagactaagttaaatatttctgcacagtgttcccatggccccttgcatttccttcttaactctctgttacacgtcattgaaactacacttttttggtctgtttttgtgctagactgtaagttccttgggggcagggcctttgtctgtctcatctctgtattcccaaatgcctaacagtacagagccatgactcaataaatacatgttaaatggatgaatg

SEQ ID NO: 14748 - DNA, 1501 bp, Homo sapiens
agcgagtccttcttttcctgactgcagctcttttcattttgccatccttttccagctccatgatggttctgcaggtttctgcggccccccggacagtggctctgacggcgttactgatggtgctgctcacatctgtggtccagggcagggccactccagagaattaccttttccagggacggcaggaatgctacgcgtttaatgggacacagcgcttcctggagagatacatctacaaccgggaggagttcgcgcgcttcgacagcgacgtgggggagttccgggcggtgacggagctggggcggcctgctgcggagtactggaacagccagaaggacatcctggaggagaagcgggcagtgccggacaggatgtgcagacacaactacgagctgggcgggcccatgaccctgcagcgccgagtccagcctagggtgaatgtttccccctccaagaaggggcccttgcagcaccacaacctgcttgtctgccacgtgacggatttctacccaggcagcattcaagtccgatggttcctgaatggacaggaggaaacagctggggtcgtgtccaccaacctgatccgtaatggagactggaccttccagatcctggtgatgctggaaatgaccccccagcagggagatgtctacacctgccaagtggagcacaccagcctggatagtcctgtcaccgtggagtggaaggcacagtctgattctgcccggagtaagacattgacgggagctgggggcttcgtgctggggctcatcatctgtggagtgggcatcttcatgcacaggaggagcaagaaagttcaacgaggatctgcataaacagggttcctgagctcactgaaaagactattgtgccttaggaaaagcatttgctgtgtttcgttagcatctggctccaggacagaccttcaacttccaaattggatactgctgccaagaagttgctctgaagtcagtttctatcattctgctctttgattcaaagcactgtttctctcactgggcctccaaccatgttcccttcttcttagcaccacaaataatcaaaacccaacatgactgtttgttttcctttaaaaatatgcaccaaatcatctctcatcacttttctctgagggttttagtagacagtaggagttaataaagaagttcattttggtttaaacataggaaagaagagaaccatgaaaatggggatatgttaactattgtataatggggcctgttacacatgacactcttctgaattgactgtatttcagtgagctgcccccaaatcaagtttagtgccctcatccatttatgtctcagaccactattcttaactattcaatggtgagcagactgcaaatctgcctgataggacccatattcccacagcactaattcaacatataccttactgagagcatgttttatcattaccattaagaagttaaatgaacatcagaatttaaaatcataaatataatctaatacacttt

SEQ ID NO: 14749 - DNA, 3794 bp, Homo sapiens
ccaagttctacctcatgtttggaggatcttgctagctatggccctcgtactcggctccctgttgctgctggggctgtgcgggaactccttttcaggagggcagccttcatccacagatgctcctaaggcttggaattatgaattgcctgcaacaaattatgagacccaagactcccataaagctggacccattggcattctctttgaactagtgcatatctttctctatgtggtacagccgcgtgatttcccagaagatactttgagaaaattcttacagaaggcatatgaatccaaaattgattatgacaagccagaaactgtaatcttaggtctaaagattgtctactatgaagcagggattattctatgctgtgtcctggggctgctgtttattattctgatgcctctggtggggtatttcttttgtatgtgtcgttgctgtaacaaatgtggtggagaaatgcaccagcgacagaaggaaaatgggcccttcctgaggaaatgctttgcaatctccctgttggtgatttgtataataataagcattggcatcttctatggttttgtggcaaatcaccaggtaagaacccggatcaaaaggagtcggaaactggcagatagcaatttcaaggacttgcgaactctcttgaatgaaactccagagcaaatcaaatatatattggcccagtacaacactaccaaggacaaggcgttcacagatctgaacagtatcaattcagtgctaggaggcggaattcttgaccgactgagacccaacatcatccctgttcttgatgagattaagtccatggcaacagcgatcaaggagaccaaagaggcgttggagaacatgaacagcaccttgaagagcttgcaccaacaaagtacacagcttagcagcagtctgaccagcgtgaaaactagcctgcggtcatctctcaatgaccctctgtgcttggtgcatccatcaagtgaaacctgcaacagcatcagattgtctctaagccagctgaatagcaaccctgaactgaggcagcttccacccgtggatgcagaacttgacaacgttaataacgttcttaggacagatttggatggcctggtccaacagggctatcaatcccttaatgatatacctgacagagtacaacgccaaaccacgactgtcgtagcaggtatcaaaagggtcttgaattccattggttcagatatcgacaatgtaactcagcgtcttcctattcaggatatactctcagcattctctgtttatgttaataacactgaaagttacatccacagaaatttacctacattggaagagtatgattcatactggtggctgggtggcctggtcatctgctctctgctgaccctcatcgtgattttttactacctgggcttactgtgtggcgtgtgcggctatgacaggcatgccaccccgaccacccgaggctgtgtctccaacaccggaggcgtcttcctcatggttggagttggattaagtttcctcttttgctggatattgatgatcattgtggttcttacctttgtctttggtgcaaatgtggaaaaactgatctgtgaaccttacacgagcaaggaattattccgggttttggatacaccctacttactaaatgaagactgggaatactatctctctgggaagctatttaataaatcaaaaatgaagctcacttttgaacaagtttacagtgactgcaaaaaaaatagaggcacttacggcactcttcacctgcagaacagcttcaatatcagtgaacatctcaacattaatgagcatactggaagcataagcagtgaattggaaagtctgaaggtaaatcttaatatctttctgttgggtgcagcaggaagaaaaaaccttcaggattttgctgcttgtggaatagacagaatgaattatgacagctacttggctcagactggtaaatcccccgcaggagtgaatcttttatcatttgcatatgatctagaagcaaaagcaaacagtttgcccccaggaaatttgaggaactccctgaaaagagatgcacaaactattaaaacaattcaccagcaacgagtccttcctatagaacaatcactgagcactctataccaaagcgtcaagatacttcaacgcacagggaatggattgttggagagagtaactaggattctagcttctctggattttgctcagaacttcatcacaaacaatacttcctctgttattattgaggaaactaagaagtatgggagaacaataataggatattttgaacattatctgcagtggatcgagttctctatcagtgagaaagtggcatcgtgcaaacctgtggccaccgctctagatactgctgttgatgtctttctgtgtagctacattatcgaccccttgaatttgttttggtttggcataggaaaagctactgtatttttacttccggctctaatttttgcggtaaaactggctaagtactatcgtcgaatggattcggaggacgtgtacgatgatgttgaaactatacccatgaaaaatatggaaaatggtaataatggttatcataaagatcatgtatatggtattcacaatcctgttatgacaagcccatcacaacattgatagctgatgttgaaactgcttgagcatcaggatactcaaagtggaaaggatcacagatttttggtagtttctgggtctacaaggactttccaaatccaggagcaacgccagtggcaacgtagtgactcaggcgggcaccaaggcaacggcaccattggtctctgggtagtgctttaagaatgaacacaatcacgttatagtccatggtccatcactattcaaggatgactccctcccttcctgtctatttttgttttttacttttttacactgagtttctatttagacactacaacatatggggtgtttgttcccattggatgcatttctatcaaaactctatcaaatgtgatggctagattctaacatattgccatgtgtggagtgtgctgaacacacaccagtttacaggaaagatgcattttgtgtacagtaaacggtgtatataccttttgttaccacagagttttttaaacaaatgagtattataggactttcttctaaatgagctaaataagtcaccattgacttcttggtgctgttgaaaataatccattttcactaaaagtgtgtgaaacctacagcatattcttcacgcagagattttcatctattatactttatcaaagattggccatgttccacttggaaatggcatgcaaaagccatcatagagaaacctgcgtaactccatctgacaaattcaaaagagagagagagatcttgagagagaaatgctgttcgttcaaaagtggagttgttttaacagatgccaattacggtgtacagtttaacagagttttctgttgcattaggataaacattaattggagtgcagctaacatgagtatcatcagactagtatcaagtgttctaaaatgaaatatgagaagatcctgtcacaattcttagatctggtgtccagcatggatgaaacctttgagtttggtccctaaatttgcatgaaagcacaaggtaaatattcatttgcttcaggagtttcatgttggatctgtcattatcaaaagtgatcagcaatgaagaactggtcggacaaaatttaacgttgatgtaatggaattccagatgtaggcattccccccaggtcttttcatgtgcagattgcagttctgattcatttgaataaaaaggaacttgg

SEQ ID NO: 14750 - DNA, 3428 bp, Homo sapiens
cgcaggtgagctgcagaggcgcgcgtggtccctgccccacccgcgcggactccctcccctttttttccgccttctgccagcagaagcagcagccgcagcacctgagccgctactgccgctcactcaggacaacgctatggctgagcctgggcacagccaccatctctccgccagagtcaggggaagaactgagaggcgcataccccggctgtggcggctgctgctctgggctgggaccgccttccaggtgacccagggaacgggaccggagcttcatgcctgcaaagagtctgagtaccactatgagtacacggcgtgtgacagcacgggttccaggtggagggtcgccgtgccgcataccccgggcctgtgcaccagcctgcctgaccccgtcaagggcaccgagtgctccttctcctgcaacgccggggagtttctggatatgaaggaccagtcatgtaagccatgcgctgagggccgctactccctcggcacaggcattcggtttgatgagtgggatgagctgccccatggctttgccagcctctcagccaacatggagctggatgacagtgctgctgagtccaccgggaactgtacttcgtccaagtgggttccccggggcgactacatcgcctccaacacggacgaatgcacagccacactgatgtacgccgtcaacctgaagcaatctggcaccgttaacttcgaatactactatccagactccagcatcatctttgagtttttcgttcagaatgaccagtgccagcccaatgcagatgactccaggtggatgaagaccacagagaaaggatgggaattccacagtgtggagctaaatcgaggcaataatgtcctctattggagaaccacagccttctcagtatggaccaaagtacccaagcctgtgctggtgagaaacattgccataacaggggtggcctacacttcagaatgcttcccctgcaaacctggcacgtatgcagacaagcagggctcctctttctgcaaactttgcccagccaactcttattcaaataaaggagaaacttcttgccaccagtgtgaccctgacaaatactcagagaaaggatcttcttcctgtaacgtgcgcccagcttgcacagacaaagattatttctacacacacacggcctgcgatgccaacggagagacacaactcatgtacaaatgggccaagccgaaaatctgtagcgaggaccttgagggggcagtgaagctgcctgcctctggtgtgaagacccactgcccaccctgcaacccaggcttcttcaaaaccaacaacagcacctgccagccctgcccatatggttcctactccaatggctcagactgtacccgctgccctgcagggactgaacctgctgtgggatttgaatacaaatggtggaacacgctgcccacaaacatggaaacgaccgttctcagtgggatcaacttcgagtacaagggcatgacaggctgggaggtggctggtgatcacatttacacagctgctggagcctcagacaatgacttcatgattctcactctggttgtgccaggatttagacctccgcagtcggtgatggcagacacagagaataaagaggtggccagaatcacatttgtctttgagaccctctgttctgtgaactgtgagctctacttcatggtgggtgtgaattctaggaccaacactcctgtggagacgtggaaaggttccaaaggcaaacagtcctatacctacatcattgaggagaacactaccacgagcttcacctgggccttccagaggaccacttttcatgaggcaagcaggaagtacaccaatgacgttgccaagatctactccatcaatgtcaccaatgttatgaatggtgtggcctcctactgccgtccctgtgccctagaagcctctgatgtgggctcctcctgcacctcttgtcctgctggttactatattgaccgagattcaggaacctgccactcctgccccactaacacaattctgaaagcccaccagccttatggtgtccaggcctgtgtgccctgtggtccagggaccaagaacaacaagatccactctctgtgctacaacgattgcaccttctcacgcaacactccgaccaggactttcaactacaacttctccgctttggcaaacactgtcactcttgctggagggccaagcttcacttccaaagggctgaaatacttccatcactttaccctcagtctctgtggaaaccagggtaggaaaatgtctgtgtgcaccgacaatgtcactgacctccggattcctgagggtgagtcagggttctccaaatctatcacagcctacgtctgccaggcagtcatcatccccccagaggtgacaggctacaaggccggggtttcctcacagcctgtcagccttgctgatcgacttattggggtgacaacagatatgactctggatggaatcacctccccagctgaacttttccacctggagtccttgggaataccggacgtgatcttcttttataggtccaatgatgtgacccagtcctgcagttctgggagatcaaccaccatccgcgtcaggtgcagtccacagaaaactgtccctggaagtttgctgctgccaggaacgtgctcggatgggacctgtgatggctgcaacttccacttcctgtgggagagcgcggctgcttgcccgctctgctcagtggctgactaccatgctatcgtcagcagctgtgtggctgggatccagaagactacttacgtgtggcgagaacccaagctatgctctggtggcatttctctgcctgagcagagagtcaccatctgcaaaaccatagatttctggctgaaagtgggcatctctgcaggcacctgtactgccatcctgctcaccgtcttgacctgctacttttggaaaaagaatcaaaaactagagtacaagtactccaagctggtgatgaatgctactctcaaggactgtgacctgccagcagctgacagctgcgccatcatggaaggcgaggatgtagaggacgacctcatctttaccagcaagaagtcactctttgggaagatcaaatcatttacctccaagaggactcctgatggatttgactcagtgccgctgaagacatcctcaggaggcctagacatggacctgtgagaggcactgcctgcctcacctgcctcctcaccttgcatagcacctttgcaagcctgcggcgatttgggtgccagcatcctgcaacacccactgctggaaatctcttcattgtggccttatcagatgtttgaatttcagatctttttttatagagtacccaaaccctcctttctgcttgcctcaaacctgccaaatatacccacactttgtttgtaaattaaaaaaaaaaaaaaaaaaaaaaaaaaaaaaa

SEQ ID NO: 14751 - DNA, 2832 bp, Homo sapiens
agtcgaggtatcttctccccaaccactgctcttattttaattattgcagacggaagttgaagactattgacatagtaaatagctctgggtggcttgaaacgaaagtttaactttgcggacaaacaggacttattgtagggggtggtcaaaatagtcccggcggggcggggccatgacccctgacgtcgccggtccggcgcgcagttcagtttggcggttccggtaccgctctcacattggggcgggatgtgggagcggctgaactgcgcagcagaggacttttattctcgtctccttcagaaatttaatgaagaaaagaaaggaatccgtaaagacccatttctctatgaggctgatgtccaagtgcagttgatcagcaaaggccaaccaaaccctttgaaaaatattctaaatgaaaatgacatagtattcatagtggaaaaagtgcctttagaaaaggaagaaacaagtcatattgaagaacttcaatctgaagaaactgccatatctgatttctctactggcgaaaatgttggaccacttgctttaccagttgggaaggcaaggcagttaattggactttacaccatggctcacaatcctaatatgacccatttgaagattaatctgccagttactgcccttcctcccctttgggtaagatgtgacagttcagatcctgaaggtacttgttggctaggagctgagcttatcacaacaaacaacagcattacaggaattgtcttatatgtggtcagttgtaaagctgataaaaattattctgtaaatcttgaaaacctaaaaaatttacacaagaaaagacatcacttgtctactgtaacatccaaaggctttgcccagtatgagctctttaagtcctctgccttggatgatacaatcacagcatcacaaactgcgatcgctttggatatttcctggagtcctgtggatgagattcttcaaatccctccactctcttcaactgcaactctgaatattaaagtggaatcaggagagcccagaggtcctttgaatcatctctacagagaactgaaatttcttcttgttttggctgatggtttgaggactggtgtcactgaatggctcgagcccctggaagcaaaatctgctgttgaacttgttcaggaatttctgaatgacttaaataagctggatggatttggtgattctacaaaaaaagacactgaggttgagaccttgaagcatgacactgctgcagtcgatcgttccgtcaagcgtcttttcaaagttcggagtgatcttgattttgctgagcaactgtggtgcaaaatgagcagtagtgtgatttcataccaagacttggtgaagtgtttcacattgatcatccagagtctacaacgtggtgatatacagccatggctccatagtggaagtaacagtttactaagtaagctcattcatcagtcttatcatggaaccatggacacagtttctctcagtgggactattccagttcaaatgcttttggaaattggtttggacaaactaaagaaagattatatcagttttttcataggtcaggaacttgcatctttgaatcatttggaatacttcattgctccatcagtagatatacaagaacaggtttatcgtgtccaaaaactccaccatattctagaaatattagtcagttgcatgcctttcattaaatctcaacatgaactcctcttttctttaacacagatctgcataaagtattacaaacaaaatcctcttgatgagcaacacatttttcagctgccagtcagaccaactgctgtaaagaacttatatcaaagtgagaagccacagaaatggagagtggaaatatatagaggtcaaaagaagattaagacagtttggcaactgagtgacagctcacccatagaccatctgaattttcacaaacctgatttttcggaattaacactaaacggtagcctggaagaaaggatattctttactaacatggttacctgcagccaggtgcatttcaagtgaagtgtgctgatgaagtcctctataagcacaagccaaaaagagaaagagaaaaaaaggtaattattgtagaacctgaaaacagcaatgtatggaaaccctcaaagcagaaaagggaggaagatcctgaagattctcttatgaagctccaaaattgataatcctgtctcagctctgcctcctcaggaggagcattagtagaacagcagtgatgaggacacagagggagcagacagtgggtaccacgatctccgtaaccatttgcatgtgacttagcaagggctctgaaatgacaaagagaacgagcaccacaaatgagaacaggatcattttagtaaatacagctttatcccaaaagctttagctgtattgggaaaacttaaaaaatagcatcctcaaattttctgattcttatttgccatgaaatagaacttagtaaattaaatgttatttgaaaatgttataagagctttgtaaatatttcagaaaatatgggataaatgcctgaatttggttcttctacaggtgctataataaagtccatctctcaatacttatactttctaaattcatctcagaatattagcagccatattccacagttcctataatttttactgggggggatttgtgataggaaagtccttgggaaacatttccaatctttcaaaatattattgtgtatcttaagaagtataggaacttgtatgttgaaatgttgtatggtagttcttgtatagttaaataataatctttttaagagttaatgataagcatatgttatgtgcattattaataaaatagtggccactt

SEQ ID NO: 14752 - DNA, 2116 bp, Homo sapiens
acatccgcggcaacgcctccttggtgtcgtccgcttccaataacccagcttgcgtcctgcacacttgtggcttccgtgcacacattaacaactcatggttctagctcccagtcgccaagcgttgccaaggcgttgagagatcatctgggaagtcttttacccagaattgctttgattcaggccagctggtttttcctgcggtgattcggaaattcgcgaattcctctggtcctcatccaggtgcgcgggaagcaggtgcccaggagagaggggataatgaagattccatgctgatgatcccaaagattgaacctgcagaccaagcgcaaagtagaaactgaaagtacactgctggcggatcctacggaagttatggaaaaggcaaagcgcagagccacgccgtagtgtgtgccgccccccttgggatggatgaaactgcagtcgcggcgtgggtaagaggaaccagctgcagagatcaccctgcccaacacagactcggcaactccgcggaagaccagggtcctgggagtgactatgggcggtgagagcttgctcctgctccagttgcggtcatcatgactacgcccgcctcccgcagaccatgttccatgtttcttttaggtatatctttggacttcctcccctgatccttgttctgttgccagtagcatcatctgattgtgatattgaaggtaaagatggcaaacaatatgagagtgttctaatggtcagcatcgatcaattattggacagcatgaaagaaattggtagcaattgcctgaataatgaatttaacttttttaaaagacatatctgtgatgctaataaggaaggtatgtttttattccgtgctgctcgcaagttgaggcaatttcttaaaatgaatagcactggtgattttgatctccacttattaaaagtttcagaaggcacaacaatactgttgaactgcactggccaggttaaaggaagaaaaccagctgccctgggtgaagcccaaccaacaaagagtttggaagaaaataaatctttaaaggaacagaaaaaactgaatgacttgtgtttcctaaagagactattacaagagataaaaacttgttggaataaaattttgatgggcactaaagaacactgaaaaatatggagtggcaatatagaaacacgaactttagctgcatcctccaagaatctatctgcttatgcagtttttcagagtggaatgcttcctagaagttactgaatgcaccatggtcaaaacggattagggcatttgagaaatgcatattgtattactagaagatgaatacaaacaatggaaactgaatgctccagtcaacaaactatttcttatatatgtgaacatttatcaatcagtataattctgtactgatttttgtaagacaatccatgtaaggtatcagttgcaataatacttctcaaacctgtttaaatatttcaagacattaaatctatgaagtatataatggtttcaaagattcaaaattgacattgctttactgtcaaaataattttatggctcactatgaatctattatactgtattaagagtgaaaattgtcttcttctgtgctggagatgttttagagttaacaatgatatatggataatgccggtgagaataagagagtcataaaccttaagtaagcaacagcataacaaggtccaagatacctaaaagagatttcaagagatttaattaatcatgaatgtgtaacacagtgccttcaataaatggtatagcaaatgttttgacatgaaaaaaggacaatttcaaaaaaataaaataaaataaaaataaattcacctagtctaaggatgctaaaccttagtactgagttacattgtcatttatatagattataacttgtctaaataagtttgcaatttgggagatatatttttaagataataatatatgtttaccttttaattaatgaaatatctgtatttaattttgacactatatctgtatataaaatattttcatacagcattacaaattgcttactttggaatacatttctcctttgataaaataaatgagctatgtattaacaaaaaaaaaaaaaaaaaaaaaaaaaaaaaaaaaaaaaaa

SEQ ID NO: 14753 - DNA, 2421 bp, Homo sapiens
gcggccgcaagcacgggggcgaatccccgctgggtcgagggcctgaacgggagccaatcgagcagccgaggctactgccaatcacgcggctccctccaatcccacccgtgccatttccaaaatctcggtcccactgtgcagctcaaatgtggtgttcactctgccaatcgctggaggatagagtgggaacaggaataagcagagttaagaggccaggacaaaagaagttaaagagcgcccaatacatacatgtttttgaaggcgggcagagggaataaagtccccccagtgagggtctatgggcctgattgtgtagttctgatggagccccctttgagcaagaggaacccgccagcgctgagattagcggatttggcaacggctcaggtccagccgcttcagaatatgacaggcttcccggcgctggccggcccgcccgcccactcccaactccgggccgccgtcgcgcacctccgcctgcgggacctgggcgctgaccccggcgtggccaccactccgctcggacccgagcacatggcccaggcgagcacgctgggcctcagccctccctcccaggcgttcccggcacacccggaggctccggcagccgccgcccgtgctgcagccttggtcgcgcaccccggcgcgggcagctacccctgcggcgggggcagcagtggcgcgcagccctccgcgcccccgcccccagcccctcctcttcctcccaccccttcaccccctccccctcccccgcctcctcctcctcctgccctctcgggctacaccaccaccaacagtggcggcggcggcagcagcggcaaaggccacagcagggacttcgtcctccggagggacctttccgccacggcccccgcggcggccatgcacggggccccgctcggaggggagcagcggtccggcaccggctccccccagcacccggccccgcctccccactcggccggcatgttcatctccgccagcggcacctacgcgggcccggacggcagcggcggcccggcgctcttccccgcgctgcacgacacgccgggggccccaggcggccacccgcacccgctcaacggccagatgcgcctggggctggcggcggcagcggcagccgcggcggctgagctgtacggccgcgccgaaccgcccttcgcgccgcgctctggggacgcgcactacggggcggttgcggccgcagcggcggccgccctgcacggctacggagccgtgaacttaaacctgaacctggcggctgcggcggccgcagcagcggccgggcccgggccccacctgcagcaccacgcgccgcccccggcgccgccgccgccgccggcgcccgcgcagcacccgcaccagcaccacccccacctcccaggggcggctggggccttcctgcgctacatgcggcagccaatcaagcaggagctcatctgcaagtggatcgaccccgacgagctggccgggctgccgccgccgccgccgccgccgccgccgccgccgccaccgcccccggccggcggcgccaagccctgctccaaaactttcggcaccatgcacgagctggtgaatcacgtcacggtggagcacgtgggaggccccgagcagagcagccacgtctgcttctgggaggactgtccgcgcgagggcaagcccttcaaggccaaatacaagctcatcaaccacatccgcgtgcacaccggcgagaagccctttccctgccctttccccggctgcggcaaggtcttcgcgcgctccgagaacctcaagatccacaagcgtactcatacaggggaaaagcctttcaaatgtgaatttgatggctgtgacaggaagtttgccaatagcagtgatcggaagaaacattcccatgtccacaccagtgacaagccctactactgcaagattcgaggctgtgacaaatcctacactcacccaagctccctgaggaagcacatgaagattcactgcaagtccccgccaccttctccaggaccccttggttactcatcagtggggactccagtgggcgcccccttgtcccctgtgctggacccagccaggagtcactccagcactctgtcccctcaggtgaccaacctcaatgagtggtacgtttgccaggccagtggggcccccagccacctccacaccccttccagcaacggaaccacctctgagactgaagatgaggaaatttacgggaaccctgaagttgtgcggacgatacattagaatttattattaataataataagtgaaataataagtgggagtccttggaccacatcctaacctgagacaatgccgagcctgagacaaacccgtgactcagacttgccaccgggtctaattagccctatttattcagtatgaaaccctatggtgtttgtacatttaattaatttaattaag

SEQ ID NO: 14754 - DNA, 2399 bp, Homo sapiens
ggaggaggaggaggaggagaggagcagtcagcaggcccgaggaggcaggacttcctggtgtgggggttgtcaacagcccagaaagagaaagacggagaggcagagacccaggggagccgaggagcggagacacggacccagcagggtcacgcgggaggagactcgggacacccactcgctggctgccaccgggagcagaggggggctcggccgccccctcccacatcagtctccagacccttggggcttcagaggccgctcctaggctcctcggaggaggcgcgggttccttcttttccggagagcaaactttcctcggagatgcctggcaggatgagccgcggcccccggagaggacgggacagcctctgatcgccgcctgcgtgccccgccactgcccatggccaggaggccccagggaacggacagcccgacctcttaggcgccgggaccctcaggctcagatcagtggccgaggccccagagtttgcaaactcagctctggagttcagcagcaacagcagcaggaaaaacctgcccctgctcccccctcccgccacctcccctctcctcttctcccctcacccagcaggcacccccggttcccgccaggccctcctgccatgtcggacccagacgtccccaggggctcggatgtccccgccatgtggcccccttgttccaggggtgcctgagccccttcaaggagccccaacccacccccaaccttggcccagccctgagccccagggaccatgagcgggggcaagaagaagagtagtttccaaatcaccagcgtcaccacggactatgagggccctgggagcccaggggcttcggatccccctaccccacagcccccaaccgggcccccgccccgcctgcccaatggggagcccagccccgatccggggggcaagggcaccccccggaatggctccccaccacctggggccccttcctcccgtttccgggtggtgaagctgccccacggcctgggagagccttatcgccgcggtcgctggacgtgtgtggatgtttatgagcgagacctggagccccacagcttcggcggactcctggagggaattcgaggggcctcagggggcgccgggggcagatctttggattccaggttggagctggccagcctcggcctgggcgcccccaccccaccgtcaggcctgtctcagggccccacctcctggctccgtccaccccccacctctcctggacctcaggcccgctccttcactgggggactgggccagctggtggtgcccagcaaagccaaggcagagaaacccccactgtcggcctcctcaccccagcagcgccccccagagcctgagaccggtgagagtgcgggcacatcccgggctgccacgcccctgccctctctgagggtggaagcggaggctgggggctcaggggccaggacccctccactgtcccggaggaaagctgtagacatgcggctgcggatggagttgggtgctccagaagagatggggcaggtgcccccacttgactctcgccccagctccccggccctctacttcacccacgatgccagcctggttcacaaatctccagaccccttcggagcagtagcagctcagaagttcagcctggcccactccatgttggccatcagtggtcacctagacagcgacgatgatagtggctccggaagcctggttggcattgacaacaaaatcgagcaagccatggacttggtgaagtcccacctcatgtttgcggtccgggaggaggtggaggtgctgaaggagcagatccgggaactggcggagcggaacgctgcgctggagcaggagaatgggctgctgcgcgccctggccagcccggagcagctggctcagctgccctcctcgggggtcccacggcttgggccccctgcgcccaatgggccctccgtctgagcctcccttcccttacaatgtgcctttggggctgcccggccttgcgtcagccgcctgccccctcttcctatgcagctttaatgtccccgtgtccccggggtgggagttcaaggctcagtaatggcctggtcccccggcccctgccccatctcctcatcatccccagccttgatggaggagggagggcttcaggacggggcgtcagagggagccccctctgggagggaaccaacccccaccctccctcctgggaccccccagcagtagacggcttgggggagtcggaggctccccggcagacaccccacccccatcttgttcccttgaggtgcctcctctcctctgcccaggggagggagtgtggacagtatctggaagttctgggattcaggttgttattaaaataataataataattaaaaactctgaagaaacttgaaaaaaaaaaaaaaaaaa

SEQ ID NO: 14755 - DNA, 687 bp, Homo sapiens
ggggactccttgcttctttccagccggagccgctgccttgccccccggagactgaagacatggcacccaagagggccaagagaaggacagtagagggcggaagctccagcgtcttctccatgttcgaccagactcagatccaggagttcaaagaggccttcactgtgatcgaccagaaccgtgatggtattatagacaaggaggaccttcgggacaccttcgcagccatgggccgcctcaatgtgaagaatgaggagttggatgccatgatgaaggaagccagcggtcccatcaacttcaccgtcttcctgaccatgttcggggagaagctcaagggtgccgaccctgaggatgtgatcaccggagccttcaaggtcttggaccctgagggaaagggcaccatcaagaagaagttcctggaggagctgctgaccacgcagtgtgaccgcttctcccaggaggagatcaagaacatgtgggcggccttcccccccgacgtgggcggcaacgtcgactacaaaaacatctgctacgtcatcacgcacggcgacgccaaggaccaggagtaggggcacccgcgggcctccgctgcccgacgcttctgttcggcccgacctccaccccggctcccaataaaatttaactgatctttgtttctcaaaaaaaaaaaaaaaaaaaaaaaaaaaa

SEQ ID NO: 14756 - DNA, 8658 bp, Homo sapiens
ctggcccaacatgctttggcagggatgcagaagcttctgtcggaagagaggtttgtatccatggaaacagattctgatgagaagcagctgctcaatcagatactgaatgccgtgaaagtgacgccttcgctcaacgaggacctgcaggtggaagtgatgaaggttttactatgcatcacctacacgccaacatttgatctgaatgggagtgccgtgctgaagatcgcggaggtgtgcattgagacgtacataagcagctgtcaccagcgtagcataaacactgctgtgcgggcaactctcagtcaaatgctgagtgacttgactttacagttacgacagaggcaggagaatacgataattgaaaacccagatgtcccacaggatttcgggaatcaagggtcaacagtagagtccctctgtgatgatgttgtctctgtactcaccgtcctgtgtgagaagctgcaagccgccataaatgacagccagcagctgcagcttctctacctggagtgcatcctgtctgtgctcagcagctcctcctcctccatgcacctgcacaggcgcttcacggacctgatctggaaaaacctctgccctgctctcatcgtgatcttggggaatccaattcatgacaaaaccatcacctctgctcacaccagcagcaccagtaccagcctggagtcggactctgcgtctccgggagtgtctgaccacggccgaggatcaggctgctcctgcactgcgccggccctgagcggacctgtggctcggactatctattacatcgcagccgagctggtccggctggtggggtctgtggactccatgaagcccgtgctccagtccctctaccaccgagtgctgctctaccccccaccccagcaccgggtggaagccatcaaaataatgaaagagatacttgggagcccacagcgtctctgtgacttggcaggacccagctccactgaatcagagtccagaaaaagatcaatttcaaaaagaaagtctcatctggatctcctcaaactcatcatggatggcatgaccgaagcatgcatcaagggtggcatcgaagcttgctatgcagccgtgtcctgtgtctgcaccttgctgggtgccctggatgagctcagccaggggaagggcttgagcgaaggtcaggtgcaactgctgcttctgcgccttgaggagctgaaggatggggctgagtggagccgagattccatggagatcaatgaggctgacttccgctggcagcggcgagtgctgtcctcagaacacacgccgtgggagtcagggaacgagaggagccttgacatcagcatcagtgtcaccacagacacaggccagaccactctcgagggagagttgggtcagactacacccgaggaccattcgggaaaccacaagaacagtctcaagtcgccagccatcccagagggtaaggagacgctgagcaaagtattggaaacagaggcggtagaccagccagatgtcgtgcagagaagccacacggtcccttaccctgacataactaacttcctgtcagtagactgcaggacaaggtcctatggatctaggtatagtgagagcaattttagcgttgatgaccaagacctttctaggacagagtttgattcctgtgatcagtactctatggcagcagaaaaggactcgggcaggtccgacgtgtcagacattgggtcggacaactgttcactagccgatgaagagcagacaccccgggactgcctaggccaccggtccctgcgaactgccgccctgtctctaaaactgctgaagaaccaggaggcggatcagcacagcgccaggctgttcatacagtccctggaaggcctcctccctcggctcctgtctctctccaatgtagaggaggtggacaccgctctgcagaactttgcctctactttctgctcaggcatgatgcactctcctggctttgacgggaatagcagcctcagcttccagatgctgatgaacgcagacagcctctacacagctgcacactgcgccctgctcctcaacctgaagctctcccacggtgactactacaggaagcggccgaccctggcgccaggcgtgatgaaggacttcatgaagcaggtgcagaccagcggcgtgctgatggtcttctctcaggcctggattgaggagctctaccatcaggtgctcgacaggaacatgcttggagaggctggctattggggcagcccagaagataacagccttcccctcatcacaatgctgaccgatattgacggcttagagagcagtgccattggtggccagctgatggcctcggctgctacagagtctcctttcgcccagagcaggagaattgatgactccacagtggcaggcgtggcatttgctcgctatattctggtgggctgctggaagaacttgatcgatactttatcaaccccactgactggtcgaatggcggggagctccaaagggctggccttcattctgggagctgaaggcatcaaagagcagaaccagaaggagcgggacgccatctgcatgagcctcgacgggctgcggaaagccgcacggctgagctgcgctctaggcgttgctgctaactgcgcctcagcccttgcccagatggcagctgcctcctgtgtccaagaagaaaaagaagagagggaggcccaagaacccagtgatgccatcacacaagtgaaactaaaagtggagcagaaactggagcagattgggaaggtgcagggggtgtggctgcacactgcccacgtcttgtgcatggaggccatcctcagcgtaggcctggagatgggaagccacaacccggactgctggccacacgtgttcagggtgtgtgaatacgtgggcaccctggagcacaaccacttcagcgatggtgcctcgcagccccctctgaccatcagccagccccagaaggccactggaagcgctggcctccttggggaccccgagtgtgagggctcgccccccgagcacagcccggagcaggggcgctccctgagcacggcccctgtcgtccagcccctgtccatccaggacctcgtccgggaaggcagccggggtcgggcctccgacttccgcggcgggagcctcatgagcgggagcagcgcggccaaggtggtgctcaccctctccacgcaagccgacaggctctttgaagatgctacggataagttgaacctcatggccttgggaggttttctttaccagctgaagaaagcatcgcagtctcagcttttccattctgttacagatacagttgattactctctggcaatgccaggagaagttaaatccactcaagaccgaaaaagcgccctccacctgttccgcctggggaatgccatgctgaggattgtgcggagcaaagcacggcccctgctccacgtgatgcgctgctggagccttgtggccccacacctggtggaggctgcttgccataaggaaagacatgtgtctcagaaggctgtttccttcatccatgacatactgacagaagtcctcactgactggaatgagccacctcattttcacttcaatgaagcactcttccgacctttcgagcgcattatgcagctggaattgtgtgatgaggacgtccaagaccaggttgtcacatccattggtgagctggttgaagtgtgttccacgcagatccagtcgggatggagacccttgttcagtgccctggaaacagtgcatggcgggaacaagtcagagatgaaggagtacctggttggtgactactccatgggaaaaggccaagctccagtgtttgatgtatttgaagcttttctcaatactgacaacatccaggtctttgctaatgcagccactagctacatcatgtgccttatgaagtttgtcaaaggactgggggaggtggactgtaaagagattggagactgtgccccagcacccggagccccgtccacagacctgtgcctcccggccctggattacctcaggcgctgctctcagttattggccaaaatctacaaaatgcccttgaagccaatattccttagtgggagacttgccggcttgcctcgaagacttcaggaacagtcagccagcagtgaggatggaattgaatcagtcctgtctgattttgatgatgacaccggtctgatagaagtctggataatcctgctggagcagctgacagcggctgtgtccaattgtccacggcagcaccaaccaccaactctggatttactctttgagctgttgagagatgtgacgaaaacaccaggaccagggtttggtatctatgcagtggttcacctcctccttcctgtgatgtccgtttggctccgccggagccataaagaccattcctactgggatatggcctctgccaatttcaagcacgctattggtctgtcctgtgagctggtggtggagcacattcaaagctttctacattcagatatcaggtacgagagcatgatcaataccatgctgaaggacctctttgagttgctggtcgcctgtgtggccaagcccactgaaaccatctccagagtgggctgctcctgtattagatacgtccttgtgacagcgggccctgtgttcactgaggagatgtggaggcttgcctgctgtgccctgcaagatgcgttctctgccacactcaagccagtgaaggacctgctgggctgcttccacagcggcacggagagcttcagcggggaaggctgccaggtgcgagtggcggccccgtcctcctccccaagtgccgaggccgagtactggcgcatccgagccatggcccagcaggtgtttatgctggacacccagtgctcaccaaagacaccaaacaactttgaccacgctcagtcctgccagctcattattgagctgcctcctgatgaaaaaccaaatggacacaccaagaaaagcgtgtctttcagggaaattgtggtgagcctgctgtctcatcaggtgttactccagaacttatatgacatcttgttagaagagtttgtcaaaggcccctctcctggagaggaaaagacgatacaagtgccagaagccaagctggctggcttcctcagatacatctctatgcagaacttggcagtcatattcgacctgctgctggactcttataggactgccagggagtttgacaccagccccgggctgaagtgcctgctgaagaaagtgtctggcatcgggggcgccgccaacctctaccgccagtctgcgatgagctttaacatttatttccacgccctggtgtgtgctgttctcaccaatcaagaaaccatcacggccgagcaagtgaagaaggtcctttttgaggacgacgagagaagcacggattcttcccagcagtgttcatctgaggatgaagacatctttgaggaaaccgcccaggtcagccccccgagaggcaaggagaagagacagtggcgggcacggatgcccttgctcagcgtccagcctgtcagcaacgcagattgggtgtggctggtcaagaggctgcacaagctgtgcatggaactgtgcaacaactacatccagatgcacttggacctggagaactgtatggaggagcctcccatcttcaagggcgacccgttcttcatcctgccctccttccagtccgagtcatccaccccatccaccgggggcttctctgggaaagaaaccccttccgaggatgacagaagccagtcccgggagcacatgggcgagtccctgagcctgaaggccggtggtggggacctgctgctgccccccagccccaaagtggagaagaaggatcccagccggaagaaggagtggtgggagaatgcggggaacaaaatctacaccatggcagccgacaagaccatttcaaagttgatgaccgaatacaaaaagaggaaacagcagcacaacctgtccgcgttccccaaagaggtcaaagtggagaagaaaggagagccactgggtcccaggggccaggactccccgctgcttcagcgtccccagcacttgatggaccaagggcaaatgcggcattccttcagcgcaggccccgagctgctgcgacaggacaagaggccccgctcaggctccaccgggagctccctcagtgtctcggtgagagacgcagaagcacagatccaggcatggaccaacatggtgctaacagttctcaatcagattcagattctcccagaccagaccttcacggccctccagcccgcagtgttcccgtgcatcagtcagctgacctgtcacgtgaccgacatcagagttcgccaggctgtgagggagtggctgggcagggtgggccgtgtctatgacatcattgtgtagccgactcctgttctactctcccaccaaataacagtagtgagggttagagtcctgccaatacagctgttgcattttccccaccactagccccacttaaactactactactgtctcagagaacagtgtttcctaatgtaaaaagcctttccaaccactgatcagcattggggccatactaaggtttgtatctagatgacacaaacgatattctgattttgcacattattatagaagaatctataatccttgatatgtttctaactcttgaagtatatttcccagtgcttttgcttacagtgttgtccccaaatgggtcattttcaaggattactcatttgaaaacactatattgatccatttgatccatcatttaaaaaataaatacaattcctaaggcaatatctgctggtaagtcaagctgataaacactcagacatctagtaccagggattattaattggaggaagatttatggttatgggtctggctgggaagaagacaactataaatacatattcttgggtgtcataatcaagaaagaggtgacttctgttgtaaaataatccagaacacttcaaaattattcctaaatcattaagattttcaggtattcaccaatttccccatgtaaggtactgtgttgtacctttatttctgtatttctaaaagaagaaagttctttcctagcagggtttgaagtctgtggcttatcagcctgtgacacagagtacccagtgaaagtggctggtacgtagattgtcaagagacataagaccgaccagccaccctggctgttcttgtggtgtttgtttccatccccaaggcaaacaaggaaaggaaaggaaagaagaaaaggtgccttagtcctttgttgcacttccatttccatgccccacaattgtctgaacataaggtatagcatttggtttttaagaaaacaaaacattaagacgcaactcattttatatcaacacgcttggaggaaagggactcagggaagggagcagggagtgtggggtggggatggattatgatgaaatcattttcaatcttaaaatataatacaacaatcttgcaaaattatggtgtcagttacacaagctctagtctcaaaatgaaagtaatggagaaagacactgaaatttagaaaattttgtcgatttaaaatatttctcctatctaccaagtaaagttaccctatgtttgatgtctttgcattcagaccaatatttcaggtggatatttctaagtattactagaaaatacgtttgaaagctttatcttattatttacagtatttttatatttcttacattatcctaatgattgaaaactcctcaatcaagcttacttacacacattctacagagttatttaaggcatacattataatctcccagccccattcataatgaataagtcaccctttaaatataagacacaaattctacagtattgaaataaggatttaaaggggtatttgtaaactttgccctccttgagaaatatggaactaccttagaggttaagaggaaggcagtgttctgacttctttaggtgatctgaaaaaaacacccttatcatccagtgtaccatctagagatcaccacagaatccatttttttcccagttccacaaaacactctgtttgccttcagtttttactcactagacaataattcaagtttagaaacaggtaatcagctatttgatcttaaaaggcaatgaattgttgggatatcagtgaactatgttgtatacttttgaatttttacattttataaatggaattgaaagttggataactgctttttttaaattttccaacagaagtaacaccacagttgctttgtttctttttatagcttacctgaggttcagttcttctttgtgaacctgtgagtactccacagtttactgggggaaaaggcttcagtaaagcagaggctagaattacagtatttatacatagcaacttttcataaagtagaaaaattcaaaggaagctgtctcaatttgagaataccagctgggcacggtggctcacgcctgtaatcccagcacttactttgggaggccaaggtgggcagataacctgcggtcaggagtttgagaccaggctggacaacatggtgaaacctcgtctctactaaaaatacaaaaattagccaggtgtggtaggatgcacctgtaatcccagctacttaggaggccgagacaggagaatcgctcgaacccaggaggcggacgttgcagtgagccaagattgcaccattgcactccagactgggtgacaagagtgaaactccatct

SEQ ID NO: 14757 - DNA, 713 bp, Homo sapiens
gtcatcgggacgtactaagactagggttgggccgagagtcggagccattactgcaggaaaaggtcccggagagctgagcagtcaagatgtgtgacttcaccgaagaccagaccgcagagttcaaggaggccttccagctgtttgaccgaacaggtgatggcaagatcctgtacagccagtgtggggatgtgatgagggccctgggccagaaccctaccaacgccgaggtgctcaaggtcctggggaaccccaagagtgatgagatgaatgtgaaggtgctggactttgagcactttctgcccatgctgcagacagtggccaagaacaaggaccagggcacctatgaggattatgtcgaaggacttcgggtgtttgacaaggaaggaaatggcaccgtcatgggtgctgaaatccggcatgttcttgtcacactgggtgagaagatgacagaggaagaagtagagatgctggtggcagggcatgaggacagcaatggttgtatcaactatgaagagctcgtccgcatggtgctgaatggctgaggaccttcccagtctccccagagtccgtgcctttccctgtgtgaattttgtatctagcctaaagtttccctaggctttcttgtctcagcaactttcccatcttgtctctcttggatgatgtttgccgtcagcattcaccaaataaacttgctctctgggccctcggtaaaa

SEQ ID NO: 14758 - DNA, 869 bp, Homo sapiens
ggccaccggaattaacccttcagggctgggggccgcgctatgccccgccccctccccagccccagacacggaccccgcaggagatgggtgcccccatccgcacactgtcctttggccaccggacatcatgcctcccaagaaggatgttcccgtgaagaaaccagcagggccctccatctccaaacctgctgctaagccagcagcagcaggggctcctccagccaagaccaaagctgagccagctgtcccccaggcccctcagaaaacccaggagcctccagtcgatctctccaaagtggtgatcgagtttaacaaggaccagctggaggagttcaaggaggccttcgagctgtttgaccgagtgggggatggcaagatcctgtacagccagtgtggggacgtgatgagggccctgggccagaaccccaccaacgccgaggtgctcaaggtcctggggaaccccaagagtgatgagctgaagtcgcggcgtgtggactttgagactttcctgcccatgctccaggcagtggccaagaaccgaggccaaggcacatatgaggactacttggaggggtttcgtgtgtttgacaaggaggggaacggcaaagtcatgggagcagagctcagacatgttctcaccacccttggagagaagatgactgaggaggaggtggagaccgttctggcaggacacgaggacagcaacggctgcatcaactacgaggccttcttgaaacacatcctaagcgtctgagtgctgcagatccagtggggtccggacactgggccccgcaggcgaaagcacgttccagccaccaggaggccacctattgtttcaaaataaagactgggttcctctcttggtttca

SEQ ID NO: 14759 - DNA, 758 bp, Homo sapiens
gtcatcgggacgtactaagactagggttgggccgagagtcggagccattactgcaggaaaaggtcccggagagctgagcagtcaagatgtgtgacttcaccgaagaccagaccgcagagttcaaggaggccttccagctgtttgaccgaacaggtgatggcaagatcctgtacagccagtgtggggatgtgatgagggccctgggccagaaccctaccaacgccgaggtgctcaaggtcctggggaaccccaagagtgatgagatgaatgtgaaggtgctggactttgagcactttctgcccatgctgcagacagtggccaagaacaaggaccagggcacctatgaggattatgtcgaaggacttcgggtgtttgacaaggaaggaaatggcaccgtcatgggtgctgaaatccggcatgttcttgtcacactgggtgagaagatgacagaggaagaagtagagatgctggtggcagggcatgaggacagcaatggttgtatcaactatgaagcgtttgtgaggcatatcctgtcggggtgacgggcccatggggcggagctcgtccgcatggtgctgaatggctgaggaccttcccagtctccccagagtccgtgcctttccctgtgtgaattttgtatctagcctaaagtttccctaggctttcttgtctcagcaactttcccatcttgtctctcttggatgatgtttgccgtcagcattcaccaaataaacttgctctctgggccctcggtaaaa

SEQ ID NO: 14760 - DNA, 3321 bp, Homo sapiens
ttggacagcgtggggggttggtggcactatgtggcgcgtctgtgcgcgacgggctcagaatgtagccccatgggcgggactcgaggctcggtggacggccttgcaggaggtacccggaactccacgagtgacctcgcgatctggcccggctcccgctcgtcgcaacagcgtgactacagggtatggcggggtccgggcactgtgcggctggacccccagttctggggccacgccgcggaaccgcttactgctgcagcttttggggtcgcccggccgccgctattacagtcttcccccgcatcagaaggttccattgccttctctttcccccacaatgcaggcaggcaccatagcccgttgggaaaaaaaagagggggacaaaatcaatgaaggtgacctaattgcagaggttgaaactgataaagccactgttggatttgagagcctggaggagtgttatatggcaaagatacttgttgctgaaggtaccagggatgttcccatcggagcgatcatctgtatcacagttggcaagcctgaggatattgaggcctttaaaaattatacactggattcctcagcagcacctaccccacaagcggccccagcaccaacccctgctgccactgcttcgccacctacaccttctgctcaggctcctggtagctcatatccccctcacatgcaggtacttcttcctgccctctctcccaccatgaccatgggcacagttcagagatgggaaaaaaaagtgggtgagaagctaagtgaaggagacttactggcagagatagaaactgacaaagccactataggttttgaagtacaggaagaaggttatctggcaaaaatcctggtccctgaaggcacaagagatgtccctctaggaaccccactctgtatcattgtagaaaaagaggcagatatatcagcatttgctgactataggccaaccgaagtaacagatttaaaaccacaagtgccaccacctaccccacccccggtggccgctgttcctccaactccccagcctttagctcctacaccttcagcaccctgcccagctactcctgctggaccaaagggaagggtgtttgttagccctcttgcaaagaagttggcagtagagaaagggattgatcttacacaagtaaaagggacaggaccagatggtagaatcaccaagaaggatatcgactcttttgtgcctagtaaagttgctcctgctccggcagctgttgtgcctcccacaggtcctggaatggcaccagttcctacaggtgtcttcacagatatcccaatcagcaacattcgtcgggttattgcacagcgattaatgcaatcaaagcaaaccatacctcattattacctttctatcgatgtaaatatgggagaagttttgttggtacggaaagaacttaataagatattagaagggagaagcaaaatttctgtcaatgacttcatcataaaagcttcagctttggcatgtttaaaagttcccgaagcaaattcttcttggatggacacagttataagacaaaatcatgttgttgatgtcagtgttgcggtcagtactcctgcaggactcatcacacctattgtgtttaatgcacatataaaaggagtggaaaccattgctaatgatgttgtttctttagcaaccaaagcaagagagggtaaactacagccacatgaattccagggtggcacttttacgatctccaatttaggaatgtttggaattaagaatttctctgctattattaacccacctcaagcatgtattttggcaattggtgcttcagaggataaactggtccctgcagataatgaaaaagggtttgatgtggctagcatgatgtctgttacactcagttgtgatcaccgggtggtggatggagcagttggagcccagtggcttgctgagtttagaaagtaccttgaaaaacctatcactatgttgttgtaactaactcaagaatttctaaactctcccaggtcacactgattcattcttaacaagatatttatatgttattaaacaggtggttctttttattttaaccagttatttttattattgagtctgtccagataagttatttataatgggcattactgaatttttaaaatgccgattacacccaaatattgtgcacatttaataatcagacaccagatttttagctctgtactcctaattaagggacatgtatgtggccttgcctagccctttggtgataagtacttcctctaggaaatgtacgataggtagaattgtggttccctaaagacaagtacataaaggtgaccctgatgaaaccttgaagttctgaaatttaactgcctaaaatgttctccttagatgtgagagaaagagaaatcagaaaaattaattctcttgggggaagggcttgaattgaagctttactttagaatttagccctggtttgaaattttccattacatgatcttggtttatcatcgatgggaagggtagaaaacttcaaggaaaataagtgaaattttaaaagtcagcattttcttagacctcttcagctgattgtttatttttctatgaattcctacacatggttattcccccctacttgagataatctaaatataaaccagctacttgatgtaactgagaatttgtgtggatatttatttaaacaaatgtgtaattttgagtacagaattcaacagttacctccaaaaaagaaacattgttaatataatttaacagaagttgtgaaactaaaattttctaagattaactggtagttcattgtaaatgaacataatgaacagaatttatgactccactgtggaaaatgctatcaaataactaaggaatatatatggaataagtgtacatatgtaaaatattgttactagagttagatatgtgccaaagtccatttatcccaaatcctgtctgaaaaggaggggtacattggtaaacattttggagtgcttaaaaatgccaaaaacaaaatggtaatttctactttgataaagtaaaaaagttaaatgtgtgtaaaaaagtgttctgtgtccttctactccagcatcgtctcatgtaaaataagaaagccctaaaatactattggagagaaaaaattaactaggttgctactttatttgcctaaatacttttttctattttgttagattttgcctttcttttggaaggaaggaggcgatattctggattataaaaatgaattgggaacattatcacaattccagactttctattaatatttatgtgttttaataaacgtttgaaattaaaaaaaaaaaaaaaaaaaa

SEQ ID NO: 14761 - DNA, 1635 bp, Homo sapiens
gccttttttgcagtctcaggacgggcgctttggagccggccccaggcagcgtgtgtcggtcgcctagtctggagaactagtcctcgactcacgtgcaaggatgatgctgaaaggaataacaaggcttatctctaggatccataagttggaccctgggcgttttttacacatggggacccaggctcgccaaagcattgctgctcacctagataaccaggttccagttgagagtccgagagctatttcccgcaccaatgagaatgacccggccaagcatggggatcagcacgagggtcagcactacaacatctccccccaggatttggagactgtatttccccatggccttcctcctcgctttgtgatgcaggtgaagacattcagtgaagcttgcctgatggtaaggaaaccagccctagaacttctgcattacctgaaaaacaccagttttgcttatccagctatacgatatcttctgtatggagagaagggaacaggaaaaaccctaagtctttgccatgttattcatttctgtgcaaaacaggactggctgatactacatattccagatgctcatctttgggtgaaaaattgtcgggatcttctgcagtccagctacaacaaacagcgctttgatcaacctttagaggcttcaacctggctgaagaatttcaaaactacaaatgagcgcttcctgaaccagataaaagttcaagagaagtatgtctggaataagagagaaagcactgagaaagggagtcctctgggagaagtggttgaacagggcataacacgggtgaggaacgccacagatgcagttggaattgtgctgaaagagctaaagaggcaaagttctttgggtatgtttcacctcctagtggccgtggatggaatcaatgctctttggggaagaaccactctgaaaagagaagataaaagcccgattgcccccgaggaattagcacttgttcacaacttgaggaaaatgatgaaaaatgattggcatggaggcgccattgtgtcggctttgagccagactgggtctctctttaagccccggaaagcctatctgccccaggagttgctgggaaaggaaggatttgatgccctggatccctttattcccatcctggtttccaactataacccaaaggaatttgaaagttgtattcagtattatttggaaaacaattggcttcaacatgagaaagctcctacagaagaagggaaaaaagagctgctgttcctaagtaacgcgaacccctcgctgctggagcggcactgtgcctacctctaagccaagatcacagcatgtgaggaagacagtggacatctgctttatgctggacccagtaagatgaggaagtcgggcagtacacaggaagaggagccaggcccttgtacctatgggattggacaggactgcagttggctctggacctgcattaaaatgggtttcactgtgaatgcgtgacaataagatattcccttgttcctaaaactttatatcagtttattggatgtggtttttcacatttaagataattatggctcttttcctaaaaaataaaatatctttctaaaaaaaaaaaaaaaaaaaaaaaaaaaaaaaaaaaaaaaaaaaaaaaaaaaaaa

SEQ ID NO: 14762 - DNA, 1650 bp, Homo sapiens
gccttttttgcagtctcaggacgggcgctttggagccggccccaggcagcgtgtgtcggtcgcctagtctggagaactagtcctcgactcacggtgagggaatggaccgacacgggtattgtaccgctgagggaaaggagcgggactccggacctccaggagtgcaaggatgatgctgaaaggaataacaaggcttatctctaggatccataagttggaccctgggcgttttttacacatggggacccaggctcgccaaagcattgctgctcacctagataaccaggttccagttgagagtccgagagctatttcccgcaccaatgagaatgacccggccaagcatggggatcagcacgagggtcagcactacaacatctccccccaggatttggagactgtatttccccatggccttcctcctcgctttgtgatgcaggtgaagacattcagtgaagcttgcctgatggtaaggaaaccagccctagaacttctgcattacctgaaaaacaccagttttgcttatccagctatacgatatcttctgtatggagagaagggaacaggaaaaaccctaagtctttgccatgttattcatttctgtgcaaaacaggactggctgatactacatattccagatgctcatctttgggtgaaaaattgtcgggatcttctgcagtccagctacaacaaacagcgctttgatcaacctttagaggcttcaacctggctgaagaatttcaaaactacaaatgagcgcttcctgaaccagataaaagttcaagagaagtatgtctggaataagagagaaagcactgagaaagggagtcctctgggagaagtggttgaacagggcataacacgggtgaggaacgccacagatgcagttggaattgtgctgaaagagctaaagaggcaaagttctttgggtatgtttcacctcctagtggccgtggatggaatcaatgctctttggggaagaaccactctgaaaagagaagataaaagcccgattgcccccgaggaattagcacttgttcacaacttgaggaaaatgatgaaaaatgattggcatggaggcgccattgtgtcggctttgagccagactgggtctctctttaagccccggaaagcctatctgccccaggagttgctgggaaaggaaggatttgatgccctggatccctttattcccatcctggtttccaactataacccaaaggaatttgaaagttgtattcagtattatttggaaaacaattggcttcaacatgagaaagctcctacagaagaagggaaaaaagagctgctgttcctaagtaacgcgaacccctcgctgctggagcggcactgtgcctacctctaagccaagatcacagcatgtgaggaagacagtggacatctgctttatgctggacccagtaagatgaggaagtcgggcagtacacaggaagaggagccaggcccttgtacctatgggattggacaggactgcagttggctctggacctgcattaaaatgggtttcactgtgaatgcgtgacaataagatattcccttgttcctaaaactttatatcagtttattggatgtggtttttcacatttaagataattatggctcttttcctaaaaaataaaatatctttct

SEQ ID NO: 14763 - DNA, 1471 bp, Homo sapiens
atcacacaggatccggagctggtgctgataacagcggaatcccccgtctacctctctccttggtcctggaacagcgctactgatcaccaagtagccacaaaatataataaaccctcagcacttgctcagtagttttgtgaaagtctcaagtaaaagagacacaaacaaaaaattctttttcgtgaagaactccaaaaataaaattctctagagataaaaaaaaaaaaaaaaggaaaatgccagctgatataatggagaaaaattcctcgtccccggtggctgctaccccagccagtgtcaacacgacaccggataaaccaaagacagcatctgagcacagaaagtcatcaaagcctattatggagaaaagacgaagagcaagaataaatgaaagtctgagccagctgaaaacactgattttggatgctctgaagaaagatagctcgcggcattccaagctggagaaggcggacattctggaaatgacagtgaagcacctccggaacctgcagcgggcgcagatgacggctgcgctgagcacagacccaagtgtgctggggaagtaccgagccggcttcagcgagtgcatgaacgaggtgacccgcttcctgtccacgtgcgagggcgttaataccgaggtgcgcactcggctgctcggccacctggccaactgcatgacccagatcaatgccatgacctaccccgggcagccgcaccccgccttgcaggcgccgccaccgcccccaccgggacccggcggcccccagcacgcgccgttcgcgccgccgccgccactcgtgcccatccccgggggcgcggcgccccctcccggcggcgccccctgcaagctgggcagccaggctggagaggcggctaaggtgtttggaggcttccaggtggtaccggctcccgatggccagtttgctttcctcattcccaacggggccttcgcgcacagcggccctgtcatccccgtctacaccagcaacagcggcacctccgtgggccccaacgcagtgtcaccttccagcggcccctcgcttacggcggactccatgtggaggccgtggcggaactgagggggctcaggccacccctcctcctaaactccccaacccacctctcttccctccggactctaaacaggaacttgaatactgggagagaagaggacttttttgattaagtggttactttgtgtttttttaatttctaagaagttactttttgtagagagagctgtattaagtgactgaccatgcactatatttgtatatattttatatgttcatattggattgcgcctttgtattataaaagctcagatgacatttcgttttttacacgagatttcttttttatgtgatgccaaagatgtttgaaaatgctcttaaaatatcttcctttggggaagtttatttgagaaaatataataaaagaaaaaagtaaaggcaaaaaaaaaaaaaaaaaa

SEQ ID NO: 14764 - DNA, 10221 bp, Homo sapiens
tttaagagtcaccctgggagccagctggaggattctgtgaaagattcagacaagaaaggcaaggaaacatcttttgacaagatgtcacctgaaagtggtcacagccgcatctttgaagcgactgctggccctaataagcctgagagtggatttgcagaagacagtgctgctcggggcgagggtgtgtcagacctccacgaagtggtctccctgaaggagcggatggcgaggtaccaggcagctgtttccaggggtgactgccgcagcttctctgctaatatgatggaagaatcagaaatgtgcgcagtgcctggtggtttggccaaggtgaagaaacaatttgaggacgaaattacttcttcccgtaatacctttgctcaataccaatatcaacatcagaacagatctgagcaggaggcaattcatagcagccaggttggcacttcaagaagcagccaggaaatggcaagaaatgaacaagaagggtccaaagtacagaaaattgatgttcatggaacagaaatggtctctcatcttgaaaagcacaccgaggaagtaaaccaagcatctcagtttcatcaatatgttcaagaaactgtcattgatacacctgaggatgaagagattccaaaggtttcgactaagttgttaaaagagcagtttgaaaagtctgcccaggaaaagatcctttattctgacaaagagatgacaaccccagccaagcagattaagactgaaagtgaatatgaagagactttcaagccatcatcagttgtgagtacctcttccacttcttgcgtttcaaccagccagaggaaggaaacatcaactacaagatatagtgatcacagtgtcacttcctcaactctggcacaaattaatgctacttcttcaggaatgacagaagaatttcctcctcccccacctgacgtacttcaaacttcagtagatgtgacagcattttcccagtcccctgaactgcccagtcctcctagaagactaccagtccccaaagatgtatattccaagcaaagaaatttgtatgaattaaaccgtttatataaacacatccatcctgagttaagaaaaaacttagaaaaagattatatcagtgaagtttctgagattgtttctagtcaaatgaactcagggagttcagtctcagcagatgtgcaacaagcccggtatgtttttgaaaacacaaatgacagttctcaaaaagatctgaactcagaaagagaatacttggaatgggatgaaattctgaagggagaggtgcagtccattagatggatctttgagaatcaaccattggattccatcaacaatggctctcctgatgaaggtgatatttccaggggcattgctgatcaagaaatcattgctggtggtgatgtgaaatataccacatggatgtttgaaacccaacccatcgacacacttggggcttattcttctgacactgtagaaaatgcagagaaaattcctgagctagccagaggagatgtctgcacagctcggtggatgtttgaaacaaggccattggactcaatgaataaaatgcatcaaagtcaagaagaatcagcggtaactatcagtaaggacataactgggggggatgtcaagactgtgagatacatgtttgaaactcaacatctagatcaacttggacagcttcattcagtggatgaggttcatttactgcagcttaggtctgagctcaaagaaattaagggaaatgttaaaagaagtataaaatgtttcgaaactcaaccattatatgttattagagatggttcgggccaaatgctggaaattaaaactgttcacagagaagacgttgaaaagggagatgtaagaacagcacggtggatgtttgaaacacagccgttggacacaattaacaaagatatcacagaaattaaagttgtccgaggaatatccatggaagaaaatgtcaaaggtggggtgagtaaggcaaagtggttatttgaaacccaacctttggagaaaatcaaagagtcagaagaggtcatcattgaaaaggaaaaaataataggtacagatgtctccagaaagtgttggatgtttgaaacccagccattagacattctaaaagaagttcctgatgcagattctctacaacgtgaggagataataggtggtgatgtacaaactactaagcatctatttgaaacacttccaattgaagcattaaaagacagtcctgatataggaaagcttcaaaaaatcactgcctctgaagaagaaaaaggggatgttaggcatcaaaaatggatttttgaaacccaacctctggaagacattagaaaagataaaaaggagtacacacgaacagtgaaacttgaagaagttgacagaggagatgtgaagaattacacacatatctttgaatcaaacaatttaattaaatttgatgcatcacataaaatagaggtggaaggagttacaagaggtgctgtagagttaaataaatctctcttcgagacaacaccactgtatgccattcaagatccccttggaaaatatcatcaagtaaagacagtccagcaagaagaaatcgtaagaggtgatgtaagaagctgtaggtggctttttgaaacaaggcccattgaccagtttgatgaaagcattcataaatttcaaataattagaggaatatctgctcaagaaatacagactggaaatgtgaaatctgccaaatggttgtttgaaacccaacctcttgattcaattaaatattttagtgatgtggaagaaacagaaagtaaaactgaacaaactagagatattgttaaaggggatgtcaaaacctgtaaatggctttttgagacccagccaatggagtctctttatgaaaaagtttcgttaatgaccagcagtgaagaaattcataagggagatgtcaaaacttgtacttggctctttgaaactcagccacttgataccataaaagatgactctgaaacagcagtcaaattgcaaactgtaaaacaggaggagatccaaggtggggatgttcgtacagcatgttttctttttgagacagaaaatttggacagcatacaaggagaagaagtgaaggaaatcaagcctgttgaaatggatatacaagctggagatgtttccagcatgaggtataaatttgaaaatcagtccttagattctataagttctagttcagaggaagttttgaaaaagatcaaaaccttaaaaactgaagatattcagaaaggcaatgttttaaattgtaggtggctttttgaaaaccaaccaattgataagataaaagaaagccaagaaggtgatgaatgtgttaagacggtgacagacatacaaggtggggatgtaagaaaggggtgctttatttttgagactttttctttagatgagattaaagaagaatctgactatatcagcaccaagaaaacaattactgaagaagtaatacagggtgatgtaaaaagctacagaatgctctttgaaacccagccactctatgcaattcaagaccgagaagggtcctatcatgaagtgaccacagttaaaaaagaagaggtaattcatggagatgtgcgaggaacaaggtggctttttgaaacaaagccattagactctattaataaatcagaaactgtgtatgttattaaatctgtcacacaagaagacattcagaagggagatgttagttctgtcagatacagatttgaaactcagccactggatcagatttctgaagaatcacataatattatgcccagtattgaccatatacaaggtggcaatgtaaagacaagtagacaattctttgagtctgaaaattttgataagaataactatatacgaacagtaagtgtcaatgaaatacaaaagggcaatgttaaaacatctacttggctatttgaaacccacactatggatgaactgagaggagaagggttagaatatgaaaatatcaagacagtcactcaggaagatgtgcagaaaggtgatgttaagcaggctgtgtggctttttgaaaatcgaactttcgattctattatggaagcacataaaggtatcacaaaaatgaccaaggaagaaatccctccttctgatgtcaaaacaaccacatggctctttgaaacaacaccacttcatgaatttaatgaaactagagtagaaaagatagaaattattggcaagagcattaaagaaaccttagaagatctctactctcaaaaagttatccaggctcctggaatcatcattgaagctgatgaaataggggatgttcgaatggcaaaatacaagctaatgaaccaagcatctcctgagatacagaaagaagaaattatcagggctgatctcagaaatataatggtgaacctactttccaaaagggactgtactgaaagagagattttgattagtgaagaagagaagggaaatgttaatttgactaaaactcaattattaaacagatcaactgaatttcatgctgaaaaagaagagatagtgaaaggtgatgtacaacaagcaataaaaaacctgttctctgaggaaagatctgtaaagaaaggcatcttaattcaggaagatgaaaaaggagatattaacatgactatctattgtcttcttcatgaaaatgatggtgacacaattgagcgtgaagaagtaataggtggtgatgtcaaacgtaccattcataatttattgtcttccacatcaaacaataaaatatctgaaagggctaaaattgatgcctctgagagaggaaatgttcagtttttcacaacctgcatagaagctggagctttggattatctgaaacaactccacacagagtcaaatgaaacactgacagctaagaaacaagaaggagagaaagaaatcattggtggtgatgttgaaggtacaaaactgttactgaagaaaaggcagtctctggttgaacgtactgttagtgaaactgacatcatccctggagatgtgcataacacagttaaggtttttatgaccgagcctcagagtacatttggtaagatacccaaagaagagattataaaaggtgatttgacatcaaccctaaattccctcagccaggctgtaaatcagaaaacagtgacgaaaacagaagaaattataaaaggtaacatgctagccacactcaagtcacttaaagaatcaagccatcgatggaaagaatctaaacagcctgatgccatccctggtgatattgaaaaagctattgaatgccttgaaaaagctacaaatacaaagacagaaattctgaaaaaggagcttctcaaagatgacctggaaacatcactaaggtctttgaaagaagcacaaagaagtttcaaagaggtacataaagaaggtgtaataaaaaaagatgctaaagctgtgatggcaggatcctcgggagagcagaaaacagatattcatcaggttgctgtccagaggaacaaaaatagtcttcttcagccaaagccaggtccatttgagccagcggccaagtggcaagggggagcagatactctcagtcaaactatggggaaatcttgccatggcaatttagtagaagaaagaactgaggttaatcttccaaaagcccccaaaggcactgtaaagattgtcatagatcgtgaacaaaacaatgatgctctggagaaaagccttagaagactatctaattcacaccataaatctaatgttttggaatcaggagacaaaacgggtgtctggactgatactacaggagaacagcatcttagagatgaatatatgagcagacaattaacttcaactgtgtcagttaagaataatctaacaactaaagaatcagacagggcagtgagagagctgaagaaggatgatgtctttaattccatccaatctgctggtaaaaccgttggaaagcaacagacatatgaactgagaaatgaccaccagaaaatggagggttttcatataaagagtcctaaaaagaccaaaaatattaaaatattaactgatacacaaagctccaagcccagtcccacccagcatccagtcagcatgccagttggaggaacttacgacctttcaggggactttcagaagcaaactttgttaaagcaagaaacaaaatattctaataaggatataaagaaaaagaatataaaccttcaaccaatgtggcagcttttgcctgtagagcaagacacatccaatgtaacagaaatgaaagtctctgaaaaaagtcacaatacatttaaggcaaccaacaaaaagcgggagactgatgttcacttgaaaagccaggactttctaatgaaaacaaatacttccacaggcttaaaaatggcaatggaaaggtccttgaatccaatcaactttaaccctgagaataatgtaaaagaaagtgagtgcccccttccacctccatctccacctcctccaccaccttctaatgcatcatctgaaattgaatttcctcttcctcctccacctcctttgatgatgtttcctgaaaaaaatgggtttcttccctcactgtccacagagaagataaaggctgaatttgaaagttttccaggcctccctcttcctccacctccagtagatgagaaatctgaaagagaaagttcatcgatgtttctgccgcctcctcctcctccaactccatctcaaaagccagcacatctcctttcctcctctgctccggaaaagcacagtggagacttcatgcaacaatattcccaaaaagaagcctcgaactctcagaattctcaggctaaaatcataacaggaaaaaccggtgtgttgccacctcccacattgcccaaacccaaacttcccaagcatataaaagataataagaacgatttttcccccaaagttgaactggcaacctccctgtcagatatggaatgtaaaattactacctcaaaggatcagaaaaaagtaatggtgatgaccagcagtgaacacacggagacaaagcagaacgttattagtaagagtcttgatgaaagaaaacaattatctattgactctgcaaactgtctctcacacacagttccaggaacttcagcacccaggaaaaaacagattgcgcctcttataaaatctcattcatttccagagagttcaggacaacaaaatccaaaaccttatatgagaaaatttaagacacctttaatgattgctgaagaaaaatatagacaacaaaaagaagaaattgaaaaacagaaacaggagagttcttactacaacattgttaaaactcaaagccaaaatcaacacataacagaggtggaaaaggaaatgccattacaaaaaaccaatgaggaggtttccctatctggaattgattcagaatgcactgtggttcaacccagcccaggctctcaaagtaatgctcggatactaggagtgtgttctgataaccaactctccacaacatcgccagaaacagtcgctgccaagaggctccaccatgttttagcagcttcagaagacaaagataagatgaaaaaggaagttttacaaagctcaagggacattatgcaatccaaatcagcttgcgaaattaaacaaagtcaccaagaatgtagtacccaacaaacacaacagaagaagtatttggagcagttgcacttgccccaaagcaaaccaatttccccaaatttcaaagttaaaaccatcaaacttccaactctagatcatacattaaatgaaacagaccacagctatgaaagtcataaacagcaatctgagattgatgttcaaacctttaccaaaaaacaatatctgaaaaccaagaaaactgaagcaagcactgaatgtagtcataagcaatctctggctgaaagacattatcagttacctaagaaggagaaaagagtgacagtacaattgcctacagaatccatacagaagaaccaggaagataagctcaagatggttcccaggaagcaaagagaatttagcggatctgacagagggaaacttccaggaagtgaagaaaaaaatcagggaccatcaatgattggtcgaaaagaagagagattaataactgaaagaaaacacgaacatctgaagaataaatcagcaccaaaggtcgtcaagcaaaaggttatcgatgcacatcttgattcacagactcagaattttcagcaaacacaaatacagaccgctgaaagtaaagctgaacataaaaaattgccccagccatataatagtctgcaggaagaaaaatgtctcgaagtcaagggcatacaagagaaacaagtcttctctaatactaaagattcaaagcaagagattacacagaacaaatctttcttttcctctgtgaaagaatcccagcgggatgatggaaaaggtgccttaaatatagtggaattcttgagaaaacgtgaagaactgcaacagattttgtcgagagtgaaacagtttgaagcagagccaaataaaagtggccttaaaacatttcagacactattaaatactatcccaggatggctgataagtgaagataagagagaatatgcagttcacattgccatggagaataatttagaaaaagtaaaagaagaaataacacatattaaaactcaagcggaagatatgcttgtgtcctatgaaaatataattcagacagccatgatgtcctccaaaacaggaaaaccgggaaataaacccactagtcttgatgaaacatcatccaaagtatctaatgttcatgtcagcaataataaaaatagtgaacagaaagaaaataaaattgccaaagagaaaacagtacagcaccaagtagcagctcatcatgaagcaactgttcgtagtcacgtgaaaacccatcaggaaattaaacttgatgatagcaacattcctcctccctctttaaaaacacgcccaccgtcaccaacttttatcacaatagaatctactgcccgacgaacagaaaaccctactaagaacgagctttctcagtcccctaaaaaggacagttatgttgaacccccaccaagaaggcccatgtcgcaaaaatctgaaattcacagagcaaacacttccccttctccacccaggagtcgctctgaacaacttgtcagactcaaagacaccactgcaaagttatccaaaggggccatcccatgtccagcagcaaccccggttccaattgtagagaagaggtctgaaatcatcatgtctcctgcaacacttcgtcgtcaaattaagatagaaactcgtggtagggactctccacctacaatcacaataccagtaaatataaatcatgctgctagtggttccttcagagaatctgtggacgctcaagaggaaatcaggaaagtggagaagagagctacttatgttcataaagatggactaaattccactgatcacatggtgcccgacactgaaagttatgatgcagttgaaatcatccgcaaggttgcagtgcctcctcgcctgtcagagcacacacagagatatgaagcggccaaccgaactgttcaaatggctgaaaatttcgtgaatgaccctgaaaatgaaataaacagatggttcagggaatttgagcatggcccagtttctgaagcaaagtcaaatagaagagtttatgcaaagggagaaacaaaccataacatacaacaagaaagtcgtacattttgtaaggaggaatttggattaacatctttaggaaacacgagttttacagacttttcttgcaaacatcctagagaactgcgagaaaagattcctgttaagcagcccaggatctgctctgaaaccaggtctctaagtgaacatttctcaggcatggatgcatttgagagtcaaattgttgagtcgaagatgaaaacctcttcatcacatagctcagaagctggcaaatctggctgtgacttcaagcatgccccaccaacctatgaggatgtcattgctggacatattttagatatctctgattcacctaaagaagtaagaaaaaattttcaaaagacgtggcaagagagtggaagagtttttaaaggcctgggatatgcaaccgcagatgcttctgcaactgagatgagaaccaccttccaagaggaatctgcatttataagtggtaaatgagcttgcaatgtgttaaagaagattaaccatttaaaggcatgtgttccatagccaaaatgatgtacagttaaaaagagtgcgtggaaacaaccaaacaatata

SEQ ID NO: 14765 - DNA, 1264 bp, Homo sapiens
gtggtacccagtcctcaggtgcaaccccctgcgtggtcctctgtggcagccttctctcattcagagctgttttccacagaggtagtgaaaagaactggattttcaagttcactttgcaagagaaaaagaaaactcagtagaagataatggcaagtccagactggggatatgatgacaaaaatggtcctgaacaatggagcaagctgtatcccattgccaatggaaataaccaatcccctgttgatattaaaaccagtgaaaccaaacatgacacctctctgaaacctattagtgtctcctacaacccagccacagccaaagaaattatcaatgtggggcattctttccatgtaaattttgaggacaacgataaccgatcagtgctgaaaggtggtcctttctctgacagctacaggctctttcagtttcattttcactggggcagtacaaatgagcatggttcagaacatacagtggatggagtcaaatattctgccgagcttcacgtagctcactggaattctgcaaagtactccagccttgctgaagctgcctcaaaggctgatggtttggcagttattggtgttttgatgaaggttggtgaggccaacccaaagctgcagaaagtacttgatgccctccaagcaattaaaaccaagggcaaacgagccccattcacaaattttgacccctctactctccttccttcatccctggatttctggacctaccctggctctctgactcatcctcctctttatgagagtgtaacttggatcatctgtaaggagagcatcagtgtcagctcagagcagctggcacaattccgcagccttctatcaaatgttgaaggtgataacgctgtccccatgcagcacaacaaccgcccaacccaacctctgaagggcagaacagtgagagcttcattttgatgattctgagaagaaacttgtccttcctcaagaacacagccctgcttctgacataatccagttaaaataataatttttaagaaataaatttatttcaatattagcaagacagcatgccttcaaatcaatctgtaaaactaagaaacttaaattttagttcttactgcttaattcaaataataattagtaagctagcaaatagtaatctgtaagcataagcttatcttaaattcaagtttagtttgaggaattctttaaaattacaactaagtgatttgtatgtctatttttttcagtttatttgaaccaataaaataattttatctctttct

SEQ ID NO: 14766 - DNA, 5556 bp, Homo sapiens
ccggagtcctgtgaagcgcccctgtccgcgcctctgtggggccctcagagagggctgccaggacgcgagccactgaggagccgctcagccagcgccatagcccttaggactatcggtcacattctcgcgctcctgctccggctcctccatcttggcctcggcagtggcggctgccgggaggatgtgccgccttctggcagggggaagaaggaggagaagatgaagaagcaccggcgggccttggccctggtctcctgcctctttctgtgctctctggtctggcttcccagctggcgtgtatgttgtaaagagagttcttcagcttcagcgtcatcatattactctcaagatgacaactgcgcactagaaaatgaagatgtacaattccagaaaaaggatgaaagagagggacctatcaatgccgaatcattgggaaaatcaggttcaaatttacctatttctccaaaagaacataaattaaaagatgattctattgtggatgtacaaaatacagagtcaaaaaagttaagtccaccggtggtggagacactccctacagttgatttgcatgaagagtcttccaatgcagttgtggacagtgaaactgttgaaaatatttccagctcatctacctcagaaatcactccaatctcaaagcttgatgaaatagaaaaatctggtactattccgatagccaaaccaagtgaaactgagcagtctgaaactgattgtgatgttggtgaggcccttgatgctagtgctccaattgaacaaccttcctttgtcagtccacctgacagccttgttggccagcatatagaaaatgtatcatcttcacatggtaaaggaaagataacaaaatcagaatttgaatcaaaagtttcagcaagtgaacagggcggtggtgatccaaaatctgcattgaatgcttcagataatttaaaaaatgagagctctgattatacaaaaccaggagacattgaccctacatcagtagcaagtcccaaagatccagaagatataccaacatttgatgaatggaagaagaaagttatggaagtagaaaaagaaaaaagtcagtcgatgcatgcatcttctaatggaggttcacatgccaccaaaaaggtccagaaaaatcgaaataattatgcctcagtagaatgtggtgccaaaattctagcagctaatccagaagccaagagcacatctgctattcttatagaaaatatggatctttacatgttgaatccttgcagcactaaaatttggtttgttattgaactttgtgaaccaattcaagtaaaacagcttgatattgcaaattatgaattattttcttctactcctaaagattttctggtttctatcagtgacagatatccaacaaataagtggattaagctgggtacttttcatggtagagatgagcggaatgtacagagtttccctttagatgaacagatgtatgcaaaatatgtcaagatgttcatcaagtacataaaggttgagttgctatcacattttggatcagagcacttttgtccattaagccttataagggtatttggcactagcatggtggaagaatatgaagaaattgctgattcccagtatcactcagaacgccaggaactatttgatgaggactatgattatccactggattataatactggagaggataaatcctcaaaaaatcttcttggttctgctacaaatgccattctaaatatggtgaatattgctgctaatattctgggagcaaaaactgaagacctgacagaaggaaataaaagtatatctgagaatgccactgccacagctgcacctaaaatgcctgaatcaactcctgtttcaactcctgttccatctcctgagtatgtaaccactgaagtacacacacatgacatggagccgtcaacaccagatactccaaaagagagtcccattgtacagttagttcaagaggaggaagaggaggcaagtccatctacagtgacccttctgggcagcggtgaacaggaagatgaatcatcaccctggtttgagtcagagacacaaatattttgcagtgaactgaccacaatttgttgtatttctagtttttcagaatacatatataaatggtgttcagttagagttgctctttatcggcagcgcagccgaactgctttgagtaaaggaaaagattatcttgtgttagctcaaccacccttactacttcctgcggaatcagtagatgtttcagtattgcaacctctgagtggagaattggaaaatacgaatatagaaagggaagctgaaactgttgttctgggtgatttaagtagtagtatgcaccaggatgacttggtgaatcacactgtagatgcagttgaacttgaaccaagccattctcaaactctttctcagtctcttcttttagatattaccccagaaatcaatcccttgcctaaaatagaagtatctgagtctgttgaatatgaggcaggacatataccatcaccagtgattccccaagagagttctgttgagatcgataatgaaacagaacaaaagtctgagagctttagttctatagagaaaccatctattacctatgaaacaaataaagttaatgagttaatggataatattataaaagaagatgtgaactccatgcaaattttcacaaagctgtctgaaacaatagtgccaccaataaatacagccactgtacccgacaatgaagatggggaagccaaaatgaatatagctgacacagcaaagcaaactttgatttctgttgtggattcttcttcattacctgaagtaaaagaagaagaacagtctccagaagatgcccttttgagagggttacagaggacagctacagatttttatgctgaattgcaaaattctacagatctaggatatgctaatggaaatcttgtacatggatcaaaccaaaaggagtcagtatttatgagacttaataatcgtattaaagccttagaagttaacatgtctctcagtggtcgctatctggaggagcttagccaaaggtaccgaaaacaaatggaagaaatgcaaaaggctttcaataaaacaatcgtgaaacttcagaatacttcaagaatagcagaggagcaggatcagcggcaaactgaagccatccagttgctacaggcacagctgaccaacatgacacagcttgtttcaaatttatcagcaacagtagcagaattgaaacgggaggtttcagatcgacaaagctatcttgtcatatctttggttctttgtgttgtcttgggactgatgctttgtatgcagcgttgtcgaaatacttctcaatttgatggagattatatttcaaaacttcctaaaagtaatcagtatccaagccctaaaaggtgtttctcttcctatgatgatatgaatttgaaaagaagaacttcattcccactcatgagatccaagtctctacagttaactggcaaagaagtagacccaaatgatttgtacattgtagaacccctcaagttttctccagaaaagaagaagaagcgctgcaagtacaaaattgaaaaaattgagaccataaagcctgaagaaccattgcaccccatagccaatggcgacataaaaggaagaaagccctttacgaaccagagagatttttctaatatgggagaagtttatcactcttcttataaaggtcctccatctgaaggaagctcagaaacttcatcacagtcagaagagtcctatttttgtggcatttcagcttgcacaagtctgtgcaatggacagtctcaaaagacaaaaactgagaagagggctttaaaacgaagacgatctaaagtccaagaccaaggaaaattgataaaaactctaatacagactaagtcgggatcattgccgagcctgcatgacataatcaaaggaaacaaagagatcaccgtgggaacatttggtgttacagcagtctcgggacatatctaaaattaattgaacttttcatacagaagacttttttgttgttgttctttgaagaacagtctgtagtatttgaagggtttgggggagggagaaaatattaatgggaaaggcattcagaaattatggtttctacctttttaaaaagtagatgggattgtgtcaatcttggttaatgagctacagttttacaaagctgatcacttcctataaggacaatggtagacattttataaagatgttttttcacaagattaattactgggacaaaagtaatttggaagcccagttccttaggtgggataggaatgaaagcctaaacctcttcctttagctttgttcctatttcttgcaccttcccatatttatgtgccttttgtctatttataatgccactggaagaggagggataactttttctgttatttgatttcttttataactttgttaggtttttgaagctgcaaacactacaatgctttgagggggtctgtgcctgaagctcaggagtgtggatcagacagtctaaagatcctaaaaacttgccaactggatctttgtttagcaaactcactggaaatgaacacttaatggaatttttaagtctgttctgttaggtagatggtgatgctcttgttattttcacttattcagactggattacttcttacttagttactaactcaatgaggaaaaatccctacaggatctttttttgcaaacaactgatatatgcagacaaatttttgacaaattcaccttttaaacacacttaaccatttgtgaaggttttctttagcttacattttaaacatacacaataaacactaatcctccaaactttcactgtttttattagtatgaatataaaatttgaaggtttggccaattagtacaagtctcatgatataatcactgcctgcatacatatgcacagatccagttagtgagtttgtcaagcttaatctaattggttaagtctaaagagattattattccttgatgtttgctttgtattggctacaaatgtgcagaggtaatacatatgtgatgtcgatgtctctgtctttttttttgtctttaaaaaataattggcagcaactgtatttgaataaaatgatttcttagtatgattgtacagtaatgaatgaaagtggaacatgtttctttttgaaagggagagaattgaccatttattgttgtgatgtttaagttataacttattgagcacttttagtagtgataactgtttttaaacttgcctaatacctttcttgggtattgtttgtaatgtgacttatttaacgccttttttgtttgtttaagttgctgctttaggttaacagcgtgttttagaagatttaaatttctttcctgtctgcacaattagctattcagagcaagagggcctgattttatagaagccccttgaaaagaggtccagatgagagcagagatacagtgagaaattatgtgatctgtgtgttgtgggaagagaattttcaatatgtaactacggagctgtagtgccattagaaactgtgaatttccaaataaatctgaacacttgtctttatt

SEQ ID NO: 14767 - DNA, 5919 bp, Homo sapiens
cccaaagttcgaaaccaacagaacgaaaagcaacgaagcacacttaaagtgaggaacccggcaagcggcgaaattcttgctgaagagaagaaaaagcgaaaggttttccgctgcaaccaatcagatgagaggattcttggcacgcccctttctatctaccaatcaacatctagctcaatggggcagtccattgccacagggaaagggcttggtgcagcttccctcacaacacacacgtcattctaggccattccacgaactgtgctcaaaagaggaaaacagtgcaacagttccaaagctgatcagtctcgtggtgagcagcgaaactatagacttctctaacaaaaccatggattctaggagggactgggaaagagaaaaacgaattctggaaggcaaactacaactcccaaaggcccttgcgcggactcagcgcgcgagggacgaagggcgggcgtggacgagccggtggctgcagcggcggcggtccccggagtcctgtgaagcgcccctgtccgcgcctctgtggggccctcagagagggctgccaggacgcgagccactgaggagccgctcagccagcgccatagcccttaggactatcggtcacattctcgcgctcctgctccggctcctccatcttggcctcggcagtggcggctgccgggaggatgtgccgccttctggcagggggaagaaggaggagaagatgaagaagcaccggcgggccttggccctggtctcctgcctctttctgtgctctctggtctggcttcccagctggcgtgtatgttgtaaagagagttcctcagcttcagcgtcatcatattactctcaagatgacaactgcgcactagaaaatgaagatgtacaattccagaaaaagaatacagagtcaaaaaagttaagtccaccggtggtggagacactccctacagttgatttgcatgaagagtcttccaatgcagttgtggacagtgaaactgttgaaaatatttccagctcatctacctcagaaatcactccaatctcaaagcttgatgaaatagaaaaatctggtactattccgatagccaaaccaagtgaaactgagcagtctgaaactgattgtgatgttggtgaggcccttgatgctagtgctccaattgaacaaccttcctttgtcagtccacctgacagccttgttggccagcatatagaaaatgtatcatcttcacatggtaaaggaaagataacaaaatcagaatttgaatcaaaagtttcagcaagtgaacagggcggtggtgatccaaaatctgcattgaatgcttcagataatttaaaaaatgagagctctgattatacaaaaccaggagacattgaccctacatcagtagcaagtcccaaagatccagaagatataccaacatttgatgaatggaagaagaaagttatggaagtagaaaaagaaaaaagtcagtcgatgcatgcatcttctaatggaggttcacatgccaccaaaaaggtccagaaaaatcgaaataattatgcctcagtagaatgtggtgccaaaattctagcagctaatccagaagccaagagcacatctgctattcttatagaaaatatggatctttacatgttgaatccttgcagcactaaaatttggtttgttattgaactttgtgaaccaattcaagtaaaacagcttgatattgcaaattatgaattattttcttctactcctaaagattttctggtttctatcagtgacagatatccaacaaataagtggattaagctgggtacttttcatggtagagatgagcggaatgtacagagtttccctttagatgaacagatgtatgcaaaatatgtcaaggttgagttgctatcacattttggatcagagcacttttgtccattaagccttataagggtatttggcactaacatggtggaagaatatgaagaaattgctgattcccagtatcactcagaacgccaggaactatttgatgaggactatgattatccactggattataatactggagaggataaatcctcaaaaaatcttcttggttctgctacaaatgccattctaaatatggtgaatattgctgctaatattctgggagcaaaaactgaagacctgacagaaggaaataaaagtatatctgagaatgccactgccacagctgcacctaaaatgcctgaatcaactcctgtttcaactcctgttccatctcctgagtatgtaaccactgaagtacacacacatgacatggagccgtcaacaccagatactccaaaagagagtcccattgtacagttagttcaagaggaggaagaggaggcaagtccatctacagtgacccttctgggcagcggtgaacaggaagatgaatcatcaccctggtttgagtcagagacacaaatattttgcagtgaactgaccacaatttgttgtatttctagtttttcagaatacatatataaatggtgttcagttagagttgctctttatcggcagcgcagccgaactgctttgagtaaaggaaaagattatcttgtgttagctcaaccacccttactacttcctgcggaatcagtagatgtttcagtattgcaacctctgagtggagaattggaaaatacgaatatagaaagggaagctgaaactgttgttctgggtgatttaagtagtagtatgcaccaggatgacttggtgaatcacactgtagatgcagttgaacttgaaccaagccattctcaaactctttctcagtctcttcttttagatattaccccagaaatcaatcccttgcctaaaatagaagtatctgagtctgttgaatatgaggcaggacatataccatcaccagtgattccccaagagagttctgttgagatcgataatgaaacagaacaaaagtctgagagctttagttctatagagaaaccatctattacctatgaaacaaataaagttaatgagttaatggataatattataaaagaagatatgaactccatgcaaattttcacaaagctgtctgaaacaatagtgccaccaataaatacagccactgtacccgacaatgaagatggggaagccaaaatgaatatagctgacacagcaaagcaaactttgatttctgttgtggattcttcttcattacctgaagtaaaagaagaagaacagtctccagaagatgcccttttgagagggttacagaggacagctacagatttttatgctgaattgcaaaattctacagatctaggatatgctaatggaaatcttgtacatggatcaaaccaaaaggagtcagtatttatgagacttaataatcgtattaaagccttagaagttaacatgtctctcagtggtcgctatctggaggagcttagccaaaggtaccgaaaacaaatggaagaaatgcaaaaggctttcaacaaaacaatcgtgaaacttcagaatacttcaagaatagcagaggagcaggatcagcggcaaactgaagccatccagttgctacaggcacagctgaccaacatgacacagcttgtttcaaatttatcagcaacagtagcagaattgaaacgggaggtttcagatcgacaaagctatcttgtcatatctttggttctttgtgttgtcttgggactgatgctttgtatgcagcgttgtcgaaatacttctcaatttgatggagattatatttcaaaacttcctaaaagtaatcagtatccaagccctaaaaggtgtttctcttcctatgatgatatgaatttgaaaagaagaacttcattcccactcatgagatccaagtctctacagttaactggcaaagaagtagacccaaatgatttgtacattgtagaacccctcaagttttctccagaaaagaagaagaagcgctgcaagtacaaaattgaaaaaattgagaccataaagcctgaagaaccattgcaccccatagccaatggcgacataaaaggaagaaagccctttacgaaccagagagatttttctaatatgggagaagtttatcactcttcttataaaggtcctccatctgaaggaagctcagaaacttcatcacagtcagaagagtcctatttttgtggcatttcagcttgcacaagtctgtgcaatggacagtctcaaaagacaaaaactgagaagagggctttaaaacgaagacgatctaaagtccaagaccaaggaaaattgataaaaactctaatacagactaagtcgggatcattgccgagcctgcatgacataatcaaaggaaacaaagagatcaccgtgggaacatttggtgttacagcagtctcgggacatatctaaaattaattgaacttttcatacagaagacttttttgttgttgttctttgaagaacagtctgtagtatttgaagggtttgggggagggagaaaatattaatgggaaaggcattcagaaattatggtttctacctttttaaaaagtagatgggattgtgctcaatcttggttaatgagctacagttttacaaagctgatcacttcctataaggacaatggtagacattttataaagatgttttttcacaagattaattactgggacaaaagtaatttggaagcccagttccttaggtgggataggaatgaaagcctaaacctcttcctttagctttgttcctatttcttgcaccttcccatatttatgtgccttttgtctatttataatgccactggaagaggagggataactttttctgttatttgatttcttttataactttgttaggtttttgaagctgcaaacactacaatgctttgagggggtctgtgcctgaagctcaggagtgtggatcagacagtctaaagatcctaaaaacttgccaactggatctttgtttagcaaactcactggaaatgaacacttaatggaatttttaagtctgttctgttaggtagatggtgatgctcttgttattttcacttattcaggctggattacttcttacttagttactaactcaatgaggaaaaaatccctacaggatctttttttgcaaacaactgatatatgcagacaaatttttgacaaattcaccttttaaacacgacgttaaccgatttgtgaaggttttctttagcttacattttaaacatacacaataaacactaatcctccaaactttcactgtttttattagtatgaatataaaatttgaaggtttggccaattagtacaagtctcatgatataatcacagcctgcatacatatgcacagatccagttagtgagtttgtcaagcttaatctaattggttaagtctaaagagattattattccttgatgtttgctttgtattggctacaaatgtgcagaggtaatacatatgtgatgtcgatgtctctgtctttttttttgtctttaaaaaataattggcagcaactgtatttgaataaaatgatttcttagtatgattgtacagtaatgaatgaaagtggaacatgtttctttttgaaagggagagaattgaccatttattgttgtgatgtttaagttataacttattgagcacttttagtagtgataactgtttttaaacttgcctaatacctttcttgggtattgtttgtaatgtgacttatttaacgccttctttgtttgtttaagttgctgctttaggttaacagcgtgttttagaagatttaaatttctttcctgtctgcacaattagctattcagagcaagagggcctgattttatagaagccccttgaaaagaggtccagatgagagcagagatacagtgagaaattatgtgatctgtgtgttgtgggaagagaattttcaatatgtaactacggagctgtagtgccattagaaactgtgaatttccaaataaatctgaacacttgtctttatt

SEQ ID NO: 14768 - DNA, 2900 bp, Homo sapiens
attccagcctcattgtaacacacattctacgcctagcctggctttcttgctctccctcatctcattgtttcagcggaggccaaatctgaagtcctttccagggagtggctctgttcatcttattcgccagccaaagtaggaacagcgtaagaggagagagacacattcagcagccaaaggactcggtggaaagagcagaacaccatagacaatatgtcgctcttgggacccaaggtgctgctgtttcttgctgcattcatcatcacctctgactggatacccctgggggtcaatagtcaacgaggagacgatgtgactcaagcgactccagaaacattcacagaagatcctaatctggtgaatgatcccgctacagatgaaacagttttggctgttttggctgatattgcaccttccacagatgacttggcctccctcagtgaaaaaaataccactgcagagtgctgggatgagaaatttacctgcacaaggctctactctgtgcatcggccggttaaacaatgcattcatcagttatgcttcaccagtttacgacgtatgtacatcgtcaacaaggagatctgctctcgtcttgtctgtaaggaacacgaagctatgaaagatgagctttgccgtcagatggctggtctgccccctaggagactccgtcgctccaattacttccgacttcctccctgtgaaaatgtggatttgcagagacccaatggtctgtgatcattgaaaaagaggaaagaagaaaaaatgtatgggtgagaggaaggaggatctccttcttctccaaccattgacagctaacccttagacagtatttcttaaaccaatccttttgcaatgtccagcttttacccctactctctactttttcacccaaactgataacatttatctcattttctagcacttaaaatacaaagtctatattattgcataattttgctgcttctcaatatcatagacacagtgaatagatgatgactatatggcttatatacaaacattctatgtacaatttcaagggagactaaactttaggctaataatctttactattgaatctgtctgatatagatcttagggttgaagaagctatctttgtctatttgggctaaccatagaatttcatttattttcctcacaatattttcctagaccaactccccatcattcacgtgttcctctttactcttactttaactattttgctggcttgcccgaaaatttgcctggcaagtcttccttataagacacatcatggtaagttttgtagtcctgtaagattctgcaacacagtcaagaattatacaatcctactagcaatatataaggacccaaaatgtcttctgctaagctcagaggctggggctaaagcatgaggactatgccagctatagaacttggactcataattcgctatccaatttttcatgcagttgtctagtcgggaagtaaggttggaaactaagtctcatttactgattcgtttatgggtagtaccgggatgaacccaccaccacaaagcaaattagacaacttaatgtgaaatcataccattggttgacgtttccttgagttgctacttcgttcatcttcacaacttaacaagtgcacggtcgaattattgtgcaagtggcttttggatatcctgattggggcctaagaagggcattcagacttgaattttaataggcagacagaaagtttgcctaatagttaatacgaaagagtgaaagaaacacaatattcagacaacccacattcttatcctggctctagcagtaaccacgtagccttggataagccattttccttcattaggtcctggtttaatttcctcatctttaaaatgagaaggttaaatttatcttagtactgctgggcgcagtggctcatgcctgtaatctgagcactttgggaagctgaggcgggtggatcacttgaggtcagaaatttgagacgagcctggccaacatggtgaaaccccatctctactaaaaatacaaaaattagctgggcgtggtggcacgtgcctgtaatcccagctactcgggaggctgaggcaggagaatcaattgaacctgggaggcagaggttgcagtgagccgagatggcgccattgcactccagcctgggtgacaaaagcaaaagtccatcttaagaaatatatatatatattatatatattcttagttctaagatttcctttaattctatgattctctggatttaaatgcattattcatatttcttgaagcttagatacagtctaattcatagcaaccatatctgctttatcctaggtgagggtagcagtccacaatggaatagaagaaaatcccattataacaaatgacaaattatatatcatgaatccttctgtctgactaactcaataactttctataaaagccaatggaattcaaataggagctaggagacaacaagttatatatgacagtggaggttgtattccttttatattgctgagaaaactagttaaatgatcagattcttgctgttaagaaacaatttcgtttaatgggatctgtacaactgattttaaaaaaatgctacaaaaagccccaaagcatataatctctactccttacagtctctagaattaaatgtactcatttagacaacatattaaatgcatattttagccactttagagaaacctcataggcacagagtttccaagattaattttaagaatatcttcacgaacttgaccctcctactccacattgcaacatttccatcagacagcatttcaattccagtattatgtatattgcaaattaaacattttaaaatatttttttccaatttatttctcaaaataaaatgtcttttgttctggtaaaaaaaaaaaaaaaaaa

SEQ ID NO: 14769 - DNA, 1843 bp, Homo sapiens
agtcgtaggcgctggccgctgacatgttgaggactacgcgcggcccaggcctgggccccccgctgctccaggccgcgctgggccttgggcgggctgggtggcactggcctgcgggccgggcggcgagcggggggcgcgggcgggcctggctgcagcccacgggccgggagacgggtgtgcaggtgtacaacagcctcaccgggaggaaggaacccctaatcgtggcgcacgccgaagccgcctcctggtatagctgtggaccaactgtatatgatcatgcgcaccttggccatgcttgctcatatgttagatttgatatcattcgaaggatcctaaccaaggtttttggatgcagcatagtcatggtgatgggtattacagatgtagatgataaaatcatcaaaagagccaatgagatgaatatttcccccgcttccctcgccagtctttatgaggaagacttcaagcaggacatggcagccctgaaggttctcccacccacggtgtacctgagggtaaccgaaaatattcctcagataatttctttcattgaaggaatcattgctcgtgggaacgcttattcaacggcaaaaggcaatgtctacttcgatctgaagtctagaggagacaagtatggcaaattggtcggcgtggtccctggtccagtcggagagccagcggactctgacaagcgtcatgccagtgacttcgccctgtggaaggcggccaaaccccaggaggtgttctgggcctctccctggggacccgggaggccgggctggcacatcgagtgctctgccatcgctagtatggtatttggaagtcaactggatatccattcaggtgggatagatttagcttttccacatcatgagaacgaaattgcacagtgcgaagtctttcatcagtgcgagcagtggggaaattattttctgcattctgggcatttgcacgccaaaggcaaagaagaaaaaatgtccaaatcattaaagaactacattactattaaggactttctgaagaccttttcccccgatgtcttccggttcttctgcctgcggagcagctaccgctcagccatcgactacagtgacagcgccatgctccaagctcagcagctgctcctggggctgggctctttcctggaggacgcacgtgcctacatgaaggggcagctggcctgcggctccgtcagggaagcgatgctgtgggagaggctctccagcaccaagagggccgtgaaggcggccttggcagatgattttgacacacccagggtggttgatgccatcctgggccttgcacaccacgggaatggacagctcagggcgtccctgaaggaacctgaagggccgagaagtcctgctgtgtttggtgccatcatctcttactttgaacagttttttgaaactgttggaatttctctggcaaatcaacagtacgtttcaggagacggcagcgaggctaccttgcatggtgtggtggacgagctggtgcggttccggcagaaggtccggcagtttgcgctggccatgcccgaggccacgggggacgcccggcggcagcagctcctagaaaggcagcccctgctggaagcatgcgacaccctgcgccggggcctgactgcccacggcatcaacatcaaggacagaagcagtacaacatccacgtgggaactgctggatcaaaggacaaaagaccaaaaatcagcgggctgaggatggagcacagccatgaacctgctcacgacaagacgcacccatgcttctcagggtcaaggctttatgttaaagcttcctgtcggggctgctaggtcagcattaaagtaaggcaaccaacagtg

SEQ ID NO: 14770 - DNA, 5301 bp, Homo sapiens
gcggccgccccggctcctcgcctcccccacttctggccacccctcgccggtgagagaagagaacgcgagaagggaagatgggggccgtcctgaggagcctcctggcctgcagcttctgtgtgctcctgagagcggcccctttgttgctttatgcaaacagacgggacttgcgattggttgatgctacaaatggcaaagagaatgctacgattgtagttggaggcttggaggatgcagctgcggtggactttgtgtttagtcatggcttgatatactggagtgatgtcagcgaagaagccattaaacgaacagaatttaacaaaactgagagtgtgcagaatgttgttgtttctggattattgtcccccgatgggctggcatgtgattggcttggagaaaaattgtactggacagattctgaaactaatcggattgaagtttctaatttagatggatctttacgaaaagttttattttggcaagagttggatcaacccagagctattgccttagatccttcaagtgggttcatgtactggacagactggggagaagtgccaaagatagaacgtgctggaatggatggttcaagtcgcttcattataataaacagtgaaatttactggccaaatggactgactttggattatgaagaacaaaagctttattgggcagatgcaaaacttaatttcatccacaaatcaaatctggatggaacaaatcggcaggcagtggttaaaggttcccttccacatccttttgccttgacgttatttgaggacatattgtactggactgactggagcacacactccattttggcttgcaacaagtatactggtgagggtctgcgtgaaatccattctgacatcttctctcccatggatatacatgccttcagccaacagaggcagccaaatgccacaaatccatgtggaattgacaatgggggttgttcccatttgtgtttgatgtctccagtcaagcctttttatcagtgtgcttgccccactggggtcaaactcctggagaatggaaaaacctgcaaagatggtgccacagaattattgcttttagctcgaaggacagacttgagacgcatttctttggatacaccagattttacagacattgttctgcagttagaagacatccgtcatgccattgccatagattacgatcctgtggaaggctacatctactggactgatgatgaagtgagggccatacgccgttcatttatagatggatctggcagtcagtttgtggtcactgctcaaattgcccatcctgatggtattgctgtggactgggttgcacgaaatctttattggacagacactggcactgatcgaatagaagtgacaaggctcaatgggaccatgaggaagatcttgatttcagaggacttagaggaaccccgggctattgtgttagatcccatggttgggtacatgtattggactgactggggagaaattccgaaaattgagcgagcagctctggatggttctgaccgtgtagtattggttaacacttctcttggttggccaaatggtttagccttggattatgatgaaggcaaaatatactggggagatgccaaaacagacaagattgaggttatgaatactgatggcactgggagacgagtactagtggaagacaaaattcctcacatatttggatttactttgttgggtgactatgtttactggactgactggcagaggcgtagcattgaaagagttcataaacgaagtgcagagagggaagtgatcatagatcagctgcctgacctcatgggcctaaaggctacaaatgttcatcgagtgattggttccaacccctgtgctgaggaaaacgggggatgtagccatctctgcctctatagacctcagggccttcgctgtgcttgccctattggctttgaactcatcagtgacatgaagacctgcattgtcccagaggctttccttttgttttcacggagagcagatatcagacgaatttctctggaaacaaacaataataatgtggctattccactcactggtgtcaaagaagcttctgctttggattttgatgtgacagacaaccgaatttattggactgatatatcactcaagaccatcagcagagcctttatgaatggcagtgcactggaacatgtggtagaattcggcttagattatccagaaggcatggcagtagactggcttgggaagaacttgtactgggcagacacaggaacgaatcgaattgaggtgtcaaagttggatgggcagcaccgacaagttttggtgtggaaagacctagatagtcccagagctctcgcgttggaccctgccgaaggatttatgtattggactgaatggggtggaaaacctaagatagacagagctgcaatggatggaagtgaacgtactaccttagttccaaatgtggggcgggcaaacggcctaactattgattatgctaaaaggaggctttattggacagacctggacaccaacttaatagaatcttcaaatatgcttgggctcaaccgtgaagttatagcagatgacttgcctcatccttttggcttaactcagtaccaagattatatctactggacggactggagccgacgcagcattgagcgtgccaacaaaaccagtggccaaaaccgcaccatcattcagggccatttggattatgtgatggacatcctcgtctttcactcatctcgacagtcagggtggaatgaatgtgcttccagcaatgggcactgctcccacctctgcttggctgtgccagttgggggttttgtttgtggatgccctgcccactactctcttaatgctgacaacaggacttgtagtgctcctacgactttcctgctcttcagtcaaaagagtgccatcaaccgcatggtgattgatgaacaacagagccccgacatcatccttcccatccacagccttcggaatgtccgggccattgactatgacccactggacaagcaactctattggattgactcacgacaaaacatgatccgaaaggcacaagaagatggcagccagggctttactgtggttgtgagctcagttccgagtcagaacctggaaatacaaccctatgacctcagcattgatatttacagccgctacatctactggacttgtgaggctaccaatgtcattaatgtgacaagattagatgggagatcagttggagtggtgctgaaaggcgagcaggacagacctcgagccattgtggtaaacccagagaaagggtatatgtattttaccaatcttcaggaaaggtctcctaaaattgaacgggctgctttggatgggacagaacgggaggtcctctttttcagtggcttaagtaaaccaattgctttagcccttgatagcaggctgggcaagctcttttgggctgattcagatctccggcgaattgaaagcagtgatctctcaggtgctaaccggatagtattagaagactccaatatcttgcagcctgtgggacttactgtgtttgaaaactggctctattggattgataaacagcagcaaatgattgaaaaaattgacatgacaggtcgagagggtagaaccaaagtccaagctcgaattgcccagcttagtgacattcatgcagtaaaggagctgaaccttcaagaatacagacagcacccttgtgctcaggataatggtggctgttcacatatttgtcttgtaaagggggatggtactacaaggtgttcttgccccatgcacctggttctacttcaagatgagctatcatgtggagaacctccaacatgttctcctcagcagtttacttgtttcacgggggaaattgactgtatccctgtggcttggcggtgcgatgggtttactgaatgtgaagaccacagtgatgaactcaattgtcctgtatgctcagagtcccagttccagtgtgccagtgggcagtgtattgatggtgccctccgatgcaatggagatgcaaactgccaggacaaatcagatgagaagaactgtgaagtgctttgtttaattgatcagttccgctgtgccaatggtcagtgcattggaaagcacaagaagtgtgatcataatgtggattgcagtgacaagtcagatgaactggattgttatccgactgaagaaccagcaccacaggccaccaatacagttggttctgttattggcgtaattgtcaccatttttgtgtctggaactgtatactttatctgccagaggatgttgtgtccacgtatgaagggagatggggaaactatgactaatgactatgtagttcatggaccagcttctgtgcctcttggttatgtgccacacccaagttctttgtcaggatctcttccaggaatgtctcgaggtaaatcaatgatcagctccctcagtatcatggggggaagcagtggacccccctatgaccgagcccatgttacaggagcatcatcaagtagttcttcaagcaccaaaggcacttacttccctgcaattttgaaccctccaccatccccagccacagagcgatcacattacactatggaatttggatattcttcaaacagtccttccactcataggtcatacagctacaggccatatagctaccggcactttgcaccccccaccacaccctgcagcacagatgtttgtgacagtgactatgctcctagtcggagaatgacctcagtggcaacagccaagggctataccagtgacttgaactatgattcagaacctgtgcccccacctcccacaccccgaagccaatacttgtcagcagaggagaactatgaaagctgcccaccttctccatacacagagaggagctattctcatcacctctacccaccgccaccctctccctgtacagactcctcctgaggaggggccctcctcctctgactgcctccaacgtaaaaatgtaaatataaatttggttgagatctggagggggggagggagctattagagaaggatgaggcagaccatgtacagttaaaattataaaatggggtagggaatactggagatatttgtacagaagaaaaggatatttatatattttcttaaaacagcagatttgctgcttgtgccataaaagtttgtataaaaaaaatttgtactaaaagttttatttttgcaaactaaatacacaaagcatgccttaaacccagtgaagcaactgagtacaaaggaaacaggaataataaaggcatcactgaccaggaatatctgggctttattgataccaaaaaaaaaaaaa

SEQ ID NO: 14771 - DNA, 7872 bp, Homo sapiens
atgaaggtaaaaggcagaggaatcacctgcttgctggtctcctttgctgtgatctgcctggtcgccacccctgggggcaaggcctgtcctcgccgctgtgcctgttatatgcctacggaggtacactgcacatttcggtacctgacttccatcccagacagcatcccgcccaatgtggaacgcatcaatttaggatacaacagcttggttagattgatggaaacagatttttctggcctgaccaaactggagttactcatgcttcacagcaatggcattcacacaatccctgacaagaccttctcagatttgcaggccttgcaggtcttaaaaatgagctataataaagtccgaaaacttcagaaagatactttttatggcctcaggagcttgacacgattgcacatggaccacaacaatattgagtttataaacccagaggttttttatgggctcaactttctccgcctggtgcacttggaaggaaatcagctcactaagctccacccagatacatttgtctctttgagctacctccagatatttaaaatctctttcattaagttcctatacttgtctgataacttcctgacctccctccctcaagagatggtctcctatatgcctgacctagacagcctttacctgcatggaaacccatggacctgtgattgccatttaaagtggttgtctgactggatacaggagaagccagatgtaataaaatgcaaaaaagatagaagtccctctagtgctcagcagtgtccactttgcatgaaccctaggacttctaaaggcaagccgttagctatggtctcagctgcagctttccagtgtgccaagccaaccattgactcatccctgaaatcaaagagcctgactattctggaagacagtagttctgctttcatctctccccaaggtttcatggcaccctttggctccctcactttgaatatgacagatcagtctggaaatgaagctaacatggtctgcagtattcaaaagccctcaaggacatcacccattgcattcactgaagaaaatgactacatcgtgctaaatacttcattttcaacatttttggtgtgcaacatagattacggtcacattcagccagtgtggcaaattttggctttgtacagtgattctcctctgatactagaaaggagccacttgcttagtgaaacaccgcagctctattacaaatataaacaggtggctcctaagcctgaagacatttttaccaacatagaggcagatctcagagcagatccctcttggttaatgcaagaccaaatttccttgcagctgaacagaactgccaccacattcagtacattacagatccagtactccagtgatgctcaaatcactttaccaagagcagagatgaggccagtgaaacacaaatggactatgatttcaagggataacaatactaagctggaacatactgtcttggtaggtggaaccgttggcctgaactgcccaggccaaggagaccccaccccacacgtggattggcttctagctgatggaagtaaagtgagagccccttatgtcagtgaggatggacggatcctaatagacaaaagtggaaaattggaactccagatggctgatagttttgacacaggcgtatatcactgtataagcagcaattatgatgatgcagatattctcacctataggataactgtggtagaacctttggtcgaagcctatcaggaaaatgggattcatcacacagttttcattggtgaaacacttgatcttccatgccattctactggtatcccagatgcctctattagctgggttattccaggaaacaatgtgctctatcagtcatcaagagacaagaaagttctaaacaatggcacattaagaatattacaggtcaccccgaaagaccaaggttattatcgctgtgtggcagccaacccatcaggggttgattttttgattttccaagtttcagtcaagatgaaaggacaaaggcccttggagcatgatggagaaacagagggatctggacttgatgagtccaatcctattgctcatcttaaggagccaccaggtgcacaactccgtacatctgctctgatggaggctgaggttggaaaacacacctcaagcacaagtaagaggcacaactatcgggaattaacactccagcgacgtggagattcaacacatcgacgttttagggagaataggaggcatttccctccctctgctaggagaattgacccacaacattgggcggcactgttggagaaagctaaaaagaatgctatgccagacaagcgagaaaataccacagtgagcccacccccagtggtcacccaactcccaaacatacctggtgaagaagacgattcctcaggcatgctcgctctacatgaggaatttatggtcccggccactaaagctttgaaccttccagcaaggacagtgactgctgactccagaacaatatctgatagtcctatgacaaacataaattatggcacagaattctctcctgttgtgaattcacaaatactaccacctgaagaacccacagatttcaaactgtctactgctattaaaactacagccatgtcaaagaatataaacccaaccatgtcaagccaaatacaaggcacaaccaatcaacattcatccactgtctttccactgctacttggagcaactgaatttcaggactctgaccagatgggaagaggaagagagcatttccaaagtagacccccaataacagtaaggactatgatcaaagatgtcaatgtcaaaatgcttagtagcaccaccaacaaactattattagagtcagtaaataccacaaatagtcatcagacatctgtaagagaagtgagtgaacccaggcacaatcacttctattctcacactactcaaatacttagcacctccacgttcccttcagatccacacacagctgctcattctcagtttccgatccctagaaatagtacagttaacatcccgctgttcagacgctttgggaggcagaggaaaattggcggaagggggcggattatcagcccatatagaactccagttctgcgacggcatagatacagcattttcaggtcaacaaccagaggttcttctgaaaaaagcactactgcattctcagccacagtgctcaatgtgacatgtctgtcctgtcttcccagggagaggctcaccactgccacagcagcattgtcttttccaagtgctgctcccatcaccttccccaaagctgacattgctagagtcccatcagaagagtctacaactctagtccagaatccactattactacttgagaacaaacccagtgtagagaaaacaacacccacaataaaatatttcaggactgaaatttcccaagtgactccaactggtgcagtcatgacatatgctccaacatccatacccatggaaaaaactcacaaagtaaacgccagttacccacgtgtgtctagcaccaatgaagctaaaagagattcagtgattacatcgtcactttcaggtgctatcaccaagccaccaatgactattatagccattacaaggttttcaagaaggaaaattccctggcaacagaactttgtaaataaccataacccaaaaggcagattaaggaatcaacataaagttagtttacaaaaaagcacagctgtgatgcttcctaaaacatctcctgctttacccagagacaaagtctcccctttccatttcaccacactttcaacaagtgtgatgcaaattccatctaataccttgactaccgctcaccacactacgaccaaaacacacaatcctggaagtcttccaacaaagaaggagcttcccttcccaccccttaaccctatgcttcctagtattataagcaaagactcaagtacaaaaagcatcatatcaacgcaaacagcaataccagcaacaactcctaccttccctgcatctgtcatcacttatgaaacccaaacagagagatctagagcacaaacaatacaaagagaacaggagcctcaaaagaagaacaggactgacccaaacatctctccagaccagagttctggcttcactacacccactgctatgacacctcctgttctaaccacagccgaaacttcagtcaagcccagtgtctctgcattcactcattccccaccagaaaacacaactgggatttcaagcacaatcagttttcattcaagaactcttaatctgacagatgtgattgaagaactagcccaagcaagtactcagactttgaagagcacaattgcttctgaaacaactttgtccagcaaatcacaccagagtaccacaactaggaaagcaatcattagacactcaaccataccaccattcttgagcagcagtgctactctaatgccagttcccatctcccctccctttactcagagagcagttactgacaacgtggcgactcccatttccgggcttatgacaaatacagtggtcaagctgcacgaatcctcaaggcacaatgctaaaccacagcaattagtagcagaggttgcaacatcccccaaggttcacccaaatgccaagttcacaattggaaccactcacttcatctactctaatctgttacattctactcccatgccagcactaacaacagttaaatcacagaattctaaattaactccatctccctgggcagaaaaccaattttggcacaaaccatactcagaaattgctgaaaaaggcaaaaagccagaagtaagcatgttggctactacaggcctgtccgaggccaccactcttgtttcagattgggatggacagaagaacacaaagaagagtgactttgataagaaaccagttcaagaagcaacaacttccaaactccttccctttgactctttgtctaggtatatatttgaaaagcccaggatagttggaggaaaagctgcaagttttactattccagctaactcagatgcctttcttccctgtgaagctgttggaaatcccctgcccaccattcattggaccagagtcccatcaggacttgatttatctaagaggaaacagaatagcagggtccaggttctccccaatggtaccctgtccatccagagggtggaaattcaggaccgcggacagtacttgtgttccgcatccaatctgtttggcacagaccaccttcatgtcaccttgtctgtggtttcctatcctcccaggatcctggagagacgtaccaaagagatcacagttcattccggaagcactgtggaactgaagtgcagagcagaaggtaggccaagccctacagttacctggattcttgcaaaccaaacagttgtctcagaatcatcccagggaagtaggcaggctgtggtgacggttgacggaacattggtcctccacaatctcagtatttatgaccgtggcttttacaaatgtgtggccagcaacccaggtggccaggattcactgctggttaaaatacaagtcattgcagcaccacctgttattctagagcaaaggaggcaagtcattgtaggcacttggggtgaaagtttaaaactgccctgtactgcaaaaggaactcctcagcccagcgtttactgggtcctctctgatggcactgaagtgaaaccattacagtttaccaattccaagttgttcttattttcaaatgggactttgtatataagaaacctagcctcttcagacaggggcacttatgaatgcattgctaccagttccactggttcggagcgaagagtagtaatgcttacaatggaagagcgagtgaccagccccaggatagaagctgcatcccagaaaaggactgaagtgaattttggggacaaattactactgaactgctcagccactggggagcccaaaccccaaataatgtggaggttaccatccaaggctgtggtcgaccagcagcatagagtgggcagctggatccacgtctaccctaatggatccctgtttattggatcagtaacagaaaaagacagtggtgtctacttgtgtgtggcaagaaacaaaatgggggatgatctgatactgatgcatgttagcctaagactgaaacctgccaaaattgaccacaagcagtattttagaaagcaagtgctccatgggaaagatttccaagtagattgcaaagcttccggctccccagtgccagagatatcttggagtttgcctgatggaaccatgatcaacaatgcaatgcaagccgatgacagtggccacaggactaggagatatacccttttcaacaatggaactttatacttcaacaaagttggggtagcggaggaaggagattatacttgctatgcccagaacaccctagggaaagatgaaatgaaggtccacttaacagttataacagctgctccccggataaggcagagtaacaaaaccaacaagagaatcaaagctggagacacagctgtccttgactgtgaggtcactggggatcccaaaccaaaaatattttggttgctgccttccaatgacatgatttccttctccattgataggtacacatttcatgccaatgggtctttgaccatcaacaaagtgaaactgctcgattctggagagtacgtatgtgtagcccgaaatcccagtggggatgacaccaaaatgtacaaactggatgtggtctctaaacctccattaatcaatggtctgtatacaaacagaactgttattaaagccacagctgtgagacattccaaaaaacactttgactgcagagctgaagggacaccatctcctgaagtcatgtggatcatgccagacaatattttcctcacagccccatactatggaagcagaatcacagtccataaaaatggaaccttggaaattaggaatgtgaggctttcagattcagccgactttatctgtgtggcccgaaatgaaggtggagagagcgtgttggtagtacagttagaagtactggaaatgctgagaagaccgacatttagaaatccatttaatgaaaaaatagttgcccagctgggaaagtccacagcattgaattgctctgttgatggtaacccaccacctgaaataatctggattttaccaaatggcacacgattttccaatggaccacaaagttatcagtatctgatagcaagcaatggttcttttatcatttctaaaacaactcgggaggatgcaggaaaatatcgctgtgcagctaggaataaagttggctatattgagaaattagtcatattagaaattggccagaagccagttattcttacctatgcaccagggacagtaaaaggcatcagtggagaatctctatcactgcattgtgtgtctgatggaatccctaagccaaatatcaaatggactatgccaagtggttatgtagtagacaggcctcaaattaatgggaaatacatattgcatgacaatggcaccttagtcattaaagaagcaacagcttatgacagaggaaactatatctgtaaggctcaaaatagtgttggtcatacactgattactgttccagtaatgattgtagcctaccctccccgaattacaaatcgtccacccaggagtattgtcaccaggacaggggcagcctttcagctccactgtgtggccttgggagttcccaagccagaaatcacatgggagatgcctgaccactcccttctctcaacggcaagtaaagagaggacacatggaagtgagcagcttcacttacaaggtaccctagtcattcagaatccccaaacctccgattctgggatatacaaatgcacagcaaagaacccacttggtagtgattatgcagcaacgtatattcaagtaatctga

SEQ ID NO: 14772 - DNA, 2256 bp, Homo sapiens
ctcctcttgctctaagcagggtgtttgaccttctagtcgactgcgtcccctgtacccggcgccagctgtgttcctgaccccagaataactcagggctgcaccgggcctggcagcgctccgcacacatttcctgtcgcggcctaagggaaactgttggccgctgggcccgcggggggattcttggcagttggggggtccgtcgggagcgagggcggaggggaagggagggggaaccgggttggggaagccagctgtagagggcggtgaccgcgctccagacacagctctgcgtcctcgagcgggacagatccaagttgggagcagctctgcgtgcggggcctcagagaatgaggccggcgttcgccctgtgcctcctctggcaggcgctctggcccgggccgggcggcggcgaacaccccactgccgaccgtgctggctgctcggcctcgggggcctgctacagcctgcaccacgctaccatgaagcggcaggcggccgaggaggcctgcatcctgcgaggtggggcgctcagcaccgtgcgtgcgggcgccgagctgcgcgctgtgctcgcgctcctgcgggcaggcccagggcccggagggggctccaaagacctgctgttctgggtcgcactggagcgcaggcgttcccactgcaccctggagaacgagcctttgcggggtttctcctggctgtcctccgaccccggcggtctcgaaagcgacacgctgcagtgggtggaggagccccaacgctcctgcaccgcgcggagatgcgcggtactccaggccaccggtggggtcgagcccgcaggctggaaggagatgcgatgccacctgcgcgccaacggctacctgtgcaagtaccagtttgaggtcttgtgtcctgcgccgcgccccggggccgcctctaacttgagctatcgcgcgcccttccagctgcacagcgccgctctggacttcagtccacctgggaccgaggtgagtgcgctctgccggggacagctcccgatctcagttacttgcatcgcggacgaaatcggcgctcgctgggacaaactctcgggcgatgtgttgtgtccctgccccgggaggtacctccgtgctggcaaatgcgcagagctccctaactgcctagacgacttgggaggctttgcctgcgaatgtgctacgggcttcgagctggggaaggacggccgctcttgtgtgaccagtggggaaggacagccgacccttggggggaccggggtgcccaccaggcgcccgccggccactgcaaccagccccgtgccgcagagaacatggccaatcagggtcgacgagaagctgggagagacaccacttgtccctgaacaagacaattcagtaacatctattcctgagattcctcgatggggatcacagagcacgatgtctacccttcaaatgtcccttcaagccgagtcaaaggccactatcaccccatcagggagcgtgatttccaagtttaattctacgacttcctctgccactcctcaggctttcgactcctcctctgccgtggtcttcatatttgtgagcacagcagtagtagtgttggtgatcttgaccatgacagtactggggcttgtcaagctctgctttcacgaaagcccctcttcccagccaaggaaggagtctatgggcccgccgggcctggagagtgatcctgagcccgctgctttgggctccagttctgcacattgcacaaacaatggggtgaaagtcggggactgtgatctgcgggacagagcagagggtgccttgctggcggagtcccctcttggctctagtgatgcatagggaaacaggggacatgggcactcctgtgaacagtttttcacttttgatgaaacggggaaccaagaggaacttacttgtgtaactgacaatttctgcagaaatcccccttcctctaaattccctttactccactgaggagctaaatcagaactgcacactccttccctgatgatagaggaagtggaagtgcctttaggatggtgatactgggggaccgggtagtgctggggagagatattttcttatgtttattcggagaatttggagaagtgattgaacttttcaagacattggaaacaaatagaacacaatataatttacattaaaaaataatttctaccaaaatggaaaggaaatgttctatgttgttcaggctaggagtatattggttcgaaatcccagggaaaaaaataaaaataaaaaattaaaggattgt

SEQ ID NO: 14773 - DNA, 1933 bp, Homo sapiens
ggctgggggaaatgacccgggagggtcccatgcggctacataaaattggcagccttagaactagtgggaaggcgggtgcgcgaagtcgaggggcggagagagggggccggaggagctgctttctgaatccaagttcgtgggctctctcagaagtcctcaggacggagcagaggtggccggcgggcccggctgactgcgcctctgctttctttccataaccttttctttcggactcgaatcacggctgctgcgaagggtctagttccggacactagggtgcccgaacgcgctgatgccccgagtgctcgcagggcttcccgctaaccatgctgccgccgccgcggcccgcagctgccttggcgctgcctgtgctcctgctactgctggtggtgctgacgccgcccccgaccggcgcaaggccatccccaggcccagattacctgcggcgcggctggatgcggctgctagcggagggcgagggctgcgctccctgccggccagaagagtgcgccgcgccgcggggctgcctggcgggcagggtgcgcgacgcgtgcggctgctgctgggaatgcgccaacctcgagggccagctctgcgacctggaccccagtgctcacttctacgggcactgcggcgagcagcttgagtgccggctggacacaggcggcgacctgagccgcggagaggtgccggaacctctgtgtgcctgtcgttcgcagagtccgctctgcgggtccgacggtcacacctactcccagatctgccgcctgcaggaggcggcccgcgctcggcccgatgccaacctcactgtggcacacccggggccctgcgaatcggggccccagatcgtgtcacatccatatgacacttggaatgtgacagggcaggatgtgatctttggctgtgaagtgtttgcctaccccatggcctccatcgagtggaggaaggatggcttggacatccagctgccaggggatgacccccacatctctgtgcagtttaggggtggaccccagaggtttgaggtgactggctggctgcagatccaggctgtgcgtcccagtgatgagggcacttaccgctgccttggccgcaatgccctgggtcaagtggaggcccctgctagcttgacagtgctcacacctgaccagctgaactctacaggcatcccccagctgcgatcactaaacctggttcctgaggaggaggctgagagtgaagagaatgacgattactactaggtccagagctctggcccatgggggtgggtgagcggctatagtgttcatccctgctcttgaaaagacctggaaaggggagcagggtcccttcatcgactgctttcatgctgtcagtagggatgatcatgggaggcctatttgactccaaggtagcagtgtggtaggatagagacaaaagctggaggagggtagggagagaagctgagaccaggaccggtggggtacaaaggggcccatgcaggagatgccctggccagtaggacctccaacaggttgtttcccaggctggggtgggggcctgagcagacacagaggtgcaggcaccaggattctccacttcttccagccctgctgggccacagttctaactgcccttcctcccaggccctggttcttgctatttcctggtccccaacgtttatctagcttgtttgccctttccccaaactcatcttccagaacttttccctctctcctaagccccagttgcacctactaactgcagtcccttttgctgtctgccgtcttttgtacaagagagagaacagcggagcatgacttagttcagtgcagagagataggtgaggccagctcgagatcttataccactctgtattggacaaaggctagcacagggctaggcaccaataaagatttctaatgatgcacagaaaaaaaaaaaaaaaaaaaaa

SEQ ID NO: 14774 - DNA, 2182 bp, Homo sapiens
ggagagcgaggggcggcggcggcgcccgctggcgctcaagcatggcggcggcggcattgggcagctcctcaggctcggcgtccccggccgtggctgagctctgccagaacaccccggagacctttttggaggcctccaagctgctgctcacctatgctgacaacatcctcagaaaccctaatgatgaaaaatatagatccatccggattggaaacacagccttttctactagactcttgcctgtcagaggagctgttgaatgtttatttgaaatgggctttgaagagggagaaacacatctcatctttcctaaaaaagcttcagtggagcagctgcaaaaaattcgtgacctgattgccatagagagaagtagcagactggatggctcaaataagagccacaaagtaaagtcatctcagcaacctgcagccagtacccagcttcctacaacaccatcttcaaatcccagtgggttaaaccagcacacaaggaaccgtcaagggcagtcatcagatccaccatctgcttcaacggttgctgctgactcagccattctagaagttcttcagtccaacattcagcatgtgctggtctatgaaaatcctgctcttcaggagaaagcgttggcttgtattccggtccaagaactaaaaaggaaatcacaagaaaagttatcgagagctagaaaattggataaaggtatcaatataagtgatgaggattttcttttgctggagcttttgcactggtttaaggaagaattttttcactgggtgaataacgttttgtgcagcaaatgtggtggacagactaggtctagagatagatcattactgcccagtgatgatgagctgaagtggggtgcaaaggaagtggaagatcattactgtgatgcctgccagttcagcaatcgattcccaagatataataaccctgagaaacttttggaaacaagatgtggacggtgtggcgagtgggccaattgttttacactgtgctgccgagctgtagggtttgaagctcgctatgtttgggattacacagaccatgtctggacagaagtctattctccttctcagcagcggtggctgcactgtgatgcatgtgaagatgtctgtgacaagccactcctttatgaaataggatggggcaagaagctttcctatgtcatagcattttcaaaagatgaggtagttgatgtcacttggcgatattcctgcaaacatgaagaggtgattgccagaagaactaaggttaaagaagcattacttcgagacactattaatgggcttaataagcagaggcaactgtttttgtcagaaaacagaaggaaagaacttctccagaggataattgtggagcttgttgaatttatatctcccaaaacccctaaacctggagaacttgggggaagaatatctgggtcagtggcttggagagtagcccgaggtgaaatgggtctacagagaaaagaaaccttgtttattccctgtgaaaatgagaagatttctaaacagctccacctttgttacaatattgtgaaagatcgttatgttcgagtttcaaataacaatcaaaccatttctggatgggagaatggcgtgtggaaaatggaatctatattcagaaaagttgaaacagactggcacatggtatatttggcccgaaaggaaggatcatcttttgcttatatttcctggaagtttgagtgtgggtcagttggcctaaaagtagatagcatttctattagaacaagtagtcaaacttttcagactggaacagtagaatggaaattgcgatctgatacagcacaagtagaactgacaggcgataacagtcttcactcctatgctgatttttctggtgccactgaagttattttggaagcagaattaagcagaggagatggtgatgtcgcttggcaacacacccagctgtttagacaaagcttaaatgaccatgaagaaaattgtttggagataattataaaattcagtgacctttgagaacctgaacattatagaaaagctggcaataatcaaggacttactgaagtagtctgttggttcagtgcatgcttagttggcagttaccaccctgtgctagcatatttcttttgctagctatccatcatgtaaccctcatgaaaattatctttatacgtggactataataaaatatt

SEQ ID NO: 14775 - DNA, 1527 bp, Homo sapiens
ggcggacaaagcccgattgttcctgggccctttccccatcgcgcctgggcctgctccccagcccggggcaggggcgggggccagtgtggtgacacacgctgtagctgtctccccggctggctggctcgctctctcctggggacacagaggtcggcaggcagcacacagagggacctacgggcagctgttccttcccccgactcaagaatccccggaggcccggaggcctgcagcaggagcggccatgaagaagctgatggtggtgctgagtctgattgctgcagcctgggcagaggagcagaataagttggtgcatggcggaccctgcgacaagacatctcacccctaccaagctgccctctacacctcgggccacttgctctgtggtggggtccttatccatccactgtgggtcctcacagctgcccactgcaaaaaaccgaatcttcaggtcttcctggggaagcataaccttcggcaaagggagagttcccaggagcagagttctgttgtccgggctgtgatccaccctgactatgatgccgccagccatgaccaggacatcatgctgttgcgcctggcacgcccagccaaactctctgaactcatccagccccttcccctggagagggactgctcagccaacaccaccagctgccacatcctgggctggggcaagacagcagatggtgatttccctgacaccatccagtgtgcatacatccacctggtgtcccgtgaggagtgtgagcatgcctaccctggccagatcacccagaacatgttgtgtgctggggatgagaagtacgggaaggattcctgccagggtgattctgggggtccgctggtatgtggagaccacctccgaggccttgtgtcatggggtaacatcccctgtggatcaaaggagaagccaggagtctacaccaacgtctgcagatacacgaactggatccaaaaaaccattcaggccaagtgaccctgacatgtgacatctacctcccgacctaccaccccactggctggttccagaacgtctctcacctagaccttgcctcccctcctctcctgcccagctctgaccctgatgcttaataaacgcagcgacgtgagggtcctgattctccctggttttaccccagctccatccttgcatcactggggaggacgtgatgagtgaggacttgggtcctcggtcttacccccaccactaagagaatacaggaaaatcccttctaggcatctcctctccccaacccttccacacgtttgatttcttcctgcagaggcccagccacgtgtctggaatcccagctccgctgcttactgtcggtgtccccttgggatgtacctttcttcactgcagatttctcacctgtaagatgaagataaggatgatacagtctccataaggcagtggctgttggaaagatttaaggtttcacacctatgacatacatggaatagcacctgggccaccatgcactcaataaagaatgaattttattatgaaaaaaaaaaaaaaaa

SEQ ID NO: 14776 - DNA, 2263 bp, Homo sapiens
gcacgagaagaatttaggaatttctgattcatttaaaggatttacaaattcatcaacccctgaaaactaaagcaaattgaacaggaaaaaaaaaaagaagatgggttttttaagtccaatatatgttattttcttcttttttggagtcaaagtacattgccaatatgaaacttatcagtgggatgaagactatgaccaagagccagatgatgattaccaaacaggattcccatttcgtcaaaatgtagactacggagttccttttcatcagtatactttaggctgtgtcagtgaatgcttctgtccaactaactttccatcatcaatgtactgtgataatcgcaaactcaagactatcccaaatattccgatgcacattcagcaactctaccttcagttcaatgaaattgaggctgtgactgcaaattcattcatcaatgcaactcatcttaaagaaattaacctcagccacaacaaaattaaatctcaaaagattgattatggtgtgtttgctaagcttccaaatctactacaacttcatctagagcataataatttagaagaatttccatttcctcttcctaaatctctggaaagactccttcttggttacaatgaaatctccaaactgcagacaaatgctatggatgggctagtaaacttgaccatgcttgatctctgttataattatcttcatgattctctgctaaaagacaaaatctttgccaaaatggaaaaactaatgcagctcaacctctgcagtaacagattagaatcaatgcctcctggtttgccttcttcacttatgtatctgtctttagaaaataattcaatttcttctatacccgaaaaatacttcgacaaacttccaaaacttcatactctaagaatgtcacacaacaaactacaagacatcccatataatatttttaatcttcccaacattgtagaactcagtgttggacacaacaaattgaagcaagcattctatattccaagaaatttggaacacctatacctacaaaataatgaaatagaaaagatgaatcttacagtgatgtgtccttctattgacccactacattaccaccatttaacatacattcgtgtggaccaaaataaactaaaagaaccaataagctcatacatcttcttctgcttccctcatatacacactatttattatggtgaacaacgaagcactaatggtcaaacaatacaactaaagacacaagttttcaggagatttccagatgatgatgatgaaagtgaagatcacgatgatcctgacaatgctcatgagagcccagaacaagaaggagcagaagggcactttgaccttcattattatgaaaatcaagaatagcaagaaactatataggtatacacttacgacttcacaaaacctatacttaatatagtaaatctaagtaaacatgtattactcaaagtaatatatttagaattatgtattagtataagatcagaattgaatttaagttgttggtgacatctgcatcatttcataggattagaacttactcaaaataatgtaaatctttaaaaatataaattagaatgacaagtgggaatcataaattaaacgttaatggtttcttatgctctttttaaatatagaaatatcatgttaaagaaagtgagtgtatcatttctattaacagtaatttttctaaaaatgaggaaggaagtagcattagcagtaaagacccacaggccacgaccctcctgatcactctgaggacaatatttaaatgacaggaaggtatattaatgtaacaagcattcatttaaggaatagaccattttctctgacctcttcttcaggaaagctttcacactggtatttgtgatctcaccattatgacatccatccccctagctcaccacatagcacatagaatgatatttttgatttgtaagaggccatccaggtactaaggacccaaggcatacagattcacaaaattaactaatctttttgcctcagaataccaaaacaacaaaattataaagctgttatttggacaactaaaaaacaccaaactatctcattgcaatttgtattttagcagatttcagcaactatcctaaacaatgttattgtgttccattttaactgggataaatgtttttgtaaaaatacaaccatagaaaggcctctttgttacaaaatgatttgcaaagaaataactgctttgtttgcaagattaaattagtgttggcaaaataaagttctaaagat

SEQ ID NO: 14777 - DNA, 2974 bp, Homo sapiens
ctcagggcagagggaggaaggacagcagaccagacagtcacagcagccttgacaaaacgttcctggaactcaagctcttctccacagaggaggacagagcagacagcagagaccatggagtctccctcggcccctccccacagatggtgcatcccctggcagaggctcctgctcacagcctcacttctaaccttctggaacccgcccaccactgccaagctcactattgaatccacgccgttcaatgtcgcagaggggaaggaggtgcttctacttgtccacaatctgccccagcatctttttggctacagctggtacaaaggtgaaagagtggatggcaaccgtcaaattataggatatgtaataggaactcaacaagctaccccagggcccgcatacagtggtcgagagataatataccccaatgcatccctgctgatccagaacatcatccagaatgacacaggattctacaccctacacgtcataaagtcagatcttgtgaatgaagaagcaactggccagttccgggtatacccggagctgcccaagccctccatctccagcaacaactccaaacccgtggaggacaaggatgctgtggccttcacctgtgaacctgagactcaggacgcaacctacctgtggtgggtaaacaatcagagcctcccggtcagtcccaggctgcagctgtccaatggcaacaggaccctcactctattcaatgtcacaagaaatgacacagcaagctacaaatgtgaaacccagaacccagtgagtgccaggcgcagtgattcagtcatcctgaatgtcctctatggcccggatgcccccaccatttcccctctaaacacatcttacagatcaggggaaaatctgaacctctcctgccacgcagcctctaacccacctgcacagtactcttggtttgtcaatgggactttccagcaatccacccaagagctctttatccccaacatcactgtgaataatagtggatcctatacgtgccaagcccataactcagacactggcctcaataggaccacagtcacgacgatcacagtctatgcagagccacccaaacccttcatcaccagcaacaactccaaccccgtggaggatgaggatgctgtagccttaacctgtgaacctgagattcagaacacaacctacctgtggtgggtaaataatcagagcctcccggtcagtcccaggctgcagctgtccaatgacaacaggaccctcactctactcagtgtcacaaggaatgatgtaggaccctatgagtgtggaatccagaacgaattaagtgttgaccacagcgacccagtcatcctgaatgtcctctatggcccagacgaccccaccatttccccctcatacacctattaccgtccaggggtgaacctcagcctctcctgccatgcagcctctaacccacctgcacagtattcttggctgattgatgggaacatccagcaacacacacaagagctctttatctccaacatcactgagaagaacagcggactctatacctgccaggccaataactcagccagtggccacagcaggactacagtcaagacaatcacagtctctgcggagctgcccaagccctccatctccagcaacaactccaaacccgtggaggacaaggatgctgtggccttcacctgtgaacctgaggctcagaacacaacctacctgtggtgggtaaatggtcagagcctcccagtcagtcccaggctgcagctgtccaatggcaacaggaccctcactctattcaatgtcacaagaaatgacgcaagagcctatgtatgtggaatccagaactcagtgagtgcaaaccgcagtgacccagtcaccctggatgtcctctatgggccggacacccccatcatttcccccccagactcgtcttacctttcgggagcgaacctcaacctctcctgccactcggcctctaacccatccccgcagtattcttggcgtatcaatgggataccgcagcaacacacacaagttctctttatcgccaaaatcacgccaaataataacgggacctatgcctgttttgtctctaacttggctactggccgcaataattccatagtcaagagcatcacagtctctgcatctggaacttctcctggtctctcagctggggccactgtcggcatcatgattggagtgctggttggggttgctctgatatagcagccctggtgtagtttcttcatttcaggaagactgacagttgttttgcttcttccttaaagcatttgcaacagctacagtctaaaattgcttctttaccaaggatatttacagaaaagactctgaccagagatcgagaccatcctagccaacatcgtgaaaccccatctctactaaaaatacaaaaatgagctgggcttggtggcgcgcacctgtagtcccagttactcgggaggctgaggcaggagaatcgcttgaacccgggaggtggagattgcagtgagcccagatcgcaccactgcactccagtctggcaacagagcaagactccatctcaaaaagaaaagaaaagaagactctgacctgtactcttgaatacaagtttctgataccactgcactgtctgagaatttccaaaactttaatgaactaactgacagcttcatgaaactgtccaccaagatcaagcagagaaaataattaatttcatgggactaaatgaactaatgaggattgctgattctttaaatgtcttgtttcccagatttcaggaaactttttttcttttaagctatccactcttacagcaatttgataaaatatacttttgtgaacaaaaattgagacatttacattttctccctatgtggtcgctccagacttgggaaactattcatgaatatttatattgtatggtaatatagttattgcacaagttcaataaaaatctgctctttgtataacagaaaaa

SEQ ID NO: 14778 - DNA, 2041 bp, Homo sapiens
aattgttcggcgatcgctggctgccgggacttttctcgcgctggtctcttcggtggtcagggatggcgcggaagtcgaacttgcctgtgcttctcgtgccgtttctgctctgccaggccctagtgcgctgctccagccctctgcccctggtcgtcaacacttggccctttaagaatgcaaccgaagcagcgtggagggcattagcatctggaggctctgccctggatgcagtggagagcggctgtgccatgtgtgagagagagcagtgtgacggctctgtaggctttggaggaagtcctgatgaacttggagaaaccacactagatgccatgatcatggatggcactactatggatgtaggagcagtaggagatctcagacgaattaaaaatgctattggtgtggcacggaaagtactggaacatacaacacacacacttttagtaggagagtcagccaccacatttgctcaaagtatggggtttatcaatgaagacttatctaccagtgcttctcaagctcttcattcagattggcttgctcggaattgccagccaaattattggaggaatgttataccagatccctcaaaatactgcggaccctacaaaccacctggtatcttaaagcaggatattcctatccataaagaaacagaagatgatcgtggtcatgacactattggcatggttgtaatccataagacaggacatattgctgctggtacatctacaaatggtataaaattcaaaatacatggccgtgtaggagactcaccaatacctggagctggagcctatgctgacgatactgcaggggcagccgcagccactgggaatggtgatatattgatgcgcttcctgccaagctaccaagctgtagaatacatgagaagaggagaagatccaaccatagcttgccaaaaagtgatttcaagaatccagaagcattttccagaattctttggggctgttatatgtgccaatgtgactggaagttacggtgctgcttgcaataaactttcaacatttactcagtttagtttcatggtttataattccgaaaaaaatcagccaactgaggaaaaagtggactgcatctaatccatctttactgtcaacatctgtatttaaagaagaaagaaacaaaggctgaaaaggctgctcactctcatcatctagtgttcctcatgtgttctaaagtctttttgtaaaataaacacaaaaataaatttatgttgaattggcactttctatatctgaaattgtattatctatttttatttaacctttcttatattatctgaagatgaatatgtatgtggctgtattttgtatatatttaagttttaagtgacacttggatttctgatcagtgttgcaaaaaattgctactttgagatttatttccacagtgatatattaaacccaaaaggaatcatcatatttggatgcttaaaatagagtatacaagttttttagacccaaagaaaaaaacagcagagtctcagcatgatcagtcctgattgaatttcattatgtcacagtgatgcatgtcttagcactgattattggttttacttaatattccctaaaaacttgaggaaggaagatgatagaacatgagatactctttgttttgtacatactagaaaatacagctatcttctgatgagcaattgtgttgattttctttgcttttttcctcttatggagctctcagtgtgtgaaagttctaaagccacaagaatcaatgatgttttagctgctaatatttagtattgatcgtttcttttaaaaatgatttggggaacttgatctgtactgtaattttactaattccttgtgcagaggtgggtatggcaattagaagtcaagaaatgggttgtttagcttggtttgtttccctaacttctgattaactctctgtatgacaactctacagaagttgtgcgcgtgctttctcagcagcatttttccttcaaaatcatctttttaatcaacagtcattaataaatgtacatgtacgatattcaaacttt

SEQ ID NO: 14779 - DNA, 2846 bp, Homo sapiens
aaatgcttgaggagagagagagagtaaggagccagccatgaatcctttccagaaaaatgagtccaaggaaactcttttttcacctgtctccattgaagaggtaccacctcgaccacctagccctccaaagaagccatctccgacaatctgtggctccaactatccactgagcattgccttcattgtggtgaatgaattctgcgagcgcttttcctattatggaatgaaagctgtgctgatcctgtatttcctgtatttcctgcactggaatgaagatacctccacatctatataccatgccttcagcagcctctgttattttactcccatcctgggagcagccattgctgactcgtggttgggaaaattcaagacaatcatctatctctccttggtgtatgtgcttggccatgtgatcaagtccttgggtgccttaccaatactgggaggacaagtggtacacacagtcctatcattgatcggcctgagtctaatagctttggggacaggaggcatcaaaccctgtgtggcagcttttggtggagaccagtttgaagaaaaacatgcagaggaacggactagatacttctcagtcttctacctgtccatcaatgcagggagcttgatttctacatttatcacacccatgctgagaggagatgtgcaatgttttggagaagactgctatgcattggcttttggagttccaggactgctcatggtaattgcacttgttgtgtttgcaatgggaagcaaaatatacaataaaccaccccctgaaggaaacatagtggctcaagttttcaaatgtatctggtttgctatttccaatcgtttcaagaaccgttctggagacattccaaagcgacagcactggctagactgggcggctgagaaatatccaaagcagctcattatggatgtaaaggcactgaccagggtactattcctttatatcccattgcccatgttctgggctcttttggatcagcagggttcacgatggactttgcaagccatcaggatgaataggaatttggggttttttgtgcttcagccggaccagatgcaggttctaaatccccttctggttcttatcttcatcccgttgtttgactttgtcatttatcgtctggtctccaagtgtggaattaacttctcatcacttaggaaaatggctgttggtatgatcctagcatgcctggcatttgcagttgcggcagctgtagagataaaaataaatgaaatggccccagcccagccaggtccccaggaggttttcctacaagtcttgaatctggcagatgatgaggtgaaggtgacagtggtgggaaatgaaaacaattctctgttgatagagtccatcaaatcctttcagaaaacaccacactattccaaactgcacctgaaaacaaaaagccaggattttcacttccacctgaaatatcacaatttgtctctctacactgagcattctgtgcaggagaagaactggtacagtcttgtcattcgtgaagatgggaacagtatctccagcatgatggtaaaggatacagaaagcagaacaaccaatgggatgacaaccgtgaggtttgttaacactttgcataaagatgtcaacatctccctgagtacagatacctctctcaatgttggtgaagactatggtgtgtctgcttatagaactgtgcaaagaggagaataccctgcagtgcactgtagaacagaagataagaacttttctctgaatttgggtcttctagactttggtgcagcatatctgtttgttattactaataacaccaatcagggtcttcaggcctggaagattgaagacattccagccaacaaaatgtccattgcgtggcagctaccacaatatgccctggttacagctggggaggtcatgttctctgtcacaggtcttgagttttcttattctcaggctccctctggcatgaaatctgtgctccaggcagcttggctattgacaattgcagttgggaatatcatcgtgcttgttgtggcacagttcagtggcctggtacagtgggccgaattcattttgttttcctgcctcctgctggtgatctgcctgatcttctccatcatgggctactactatgttcctgtaaagacagaggatatgcggggtccagcagataagcacattcctcacatccaggggaacatgatcaaactagagaccaagaagacaaaactctgatgactccctagattctgtcctgaccccaattcctggccctgtcttgaagcattttttttcttctactggattagacaagagagatagcagcatatcagagctgatctcctccacctttctccaatgacagaagttccaggactggttttccagtacatctttaaacaaggccccagagactctatgtctgcccgtccatcagtgaactcattaaaacttgtgcagtgttgctggagctggcctggtgtctccaaatgaccatgaaaatacacacgtataatggagatcattctctgtgggtatgcaaagttatgggaattcctttataggtaactgccatttaggactgatggccctaatttttgaggtgctgatttagaggcaaaattgcagaataacaaagaaatggtatttcaagtttttttttttataagcaatgtaattatgctattcacaggggcctcaagaattggtatgtatgatgtgatctggtccagccagggcctggcttgtcagctctctaggtttgatatgactttagtaaatttgtcaatatagatggtaggaagcagaatgccattttattaaaacacaggagaagttaaaaaaaaaaaaaaaa

SEQ ID NO: 14780 - DNA, 4229 bp, Homo sapiens
ggcggcggcgggcgcgggaagatggcggcagcggcggcggcggctgcagaacagcaaagttccaatggtcctgtaaagaagtccatgcgtgagaaggctgttgagagaaggagtgtcaataaagagcacaacagtaactttaaagctggatacattccgattgatgaagatcgtctccacaaaacagggttgagaggaagaaagggcaatttagccatctgtgtgattatcctcttgtttatcctggctgtcatcaatttaataataacacttgttatttgggccgtgattcgcattggaccaaatggctgtgatagtatggagtttcatgaaagtggcctgcttcgatttaagcaagtatctgacatgggagtgatccaccctctttataaaagcacagtaggaggaaggcgaaatgaaaatttggtcatcactggcaacaaccagcctattgtttttcagcaagggacaacaaagctcagtgtagaaaacaacaaaacttctattacaagtgacatcggcatgcagttttttgacccgaggactcaaaatatcttattcagcacagactatgaaactcatgagtttcatttgccaagtggagtgaaaagtttgaatgttcaaaaggcatctactgaaaggattaccagcaatgctaccagtgatttaaatataaaagttgatgggcgtgctattgtgcgtggaaatgaaggtgtattcattatgggcaaaaccattgaatttcacatgggtggtaatatggagttaaaggcggaaaacagtatcatcctaaatggatctgtgatggtcagcaccacccgcctacccagttcctccagtggagaccagttgggtagtggtgactgggtacgctacaagctctgcatgtgtgctgatgggacgctcttcaaggtgcaagtaaccagccagaacatgggctgccaaatctcagacaacccctgtggaaacactcattaaaagaaccccagaggtcaccaacatgtttatatcttgacttgacttttttatgcatgcaaatcattgtttttacagagtttgtgataactcataattattttaatggcagagcactgctgtatctgttttatggtctacatagttaaaatcttctcagagagcctaaattctaatacattttattaatttatactaatcttcatatttactgttctctaaaataattatgagaagcaaataaaatcaaaagtcatgtttaaagacgtgtttttaaaattccactatcccttttctaaaggttaaaggtctgaagcagctgtttagattcactgtaagtaaactttggtaactctaatggggatagacccacttaagatatttaaaaaggtatggcatcagcgtttcatgctctgccttttagcttctaaaaggaaagatgcagatttctagtgcattaagcctgagccatattctcacatgcaagtgaagtcattaaagaactttacatatgtgagatagaaacaatggttccttagttttgcactgggaagaaaatattttgtaaaagaatgtttatttgaaataatgataactatcaattgttcacaatgtggtggaaattaaaacaccatctcagctttaacttttaaataataatgataactatctttattgagcatcttctacatcctaggcattgtcctaggcattgcatgtttatatccccaattctcaccacaaccctgcaagtaggtggtattatccaagttttacccattaagaaactgaagatcagagaagttaagaaacttgctcaacatcatatagtaagtagcagagttgggattggaattcaggcatgactcaaacctggatgtacttgattccaaatgccatgttgttttcactctctgcactgactttttaattatttaaaactctagaaagatgaacaaaggttaatttaaacttacctaagaagatgagaatcaaacaaaacagatatgcttactctagttaaaaagaaaataaatctcatgtcagacccagaaaggaccaatcactgtccgattgtaagctatgttgggccaattccaaaatattatacgatggagaggtcaaatttacctacttctgagttacctcagtttcccaacaatggaccttggcacactggagtaacaatacataacagagttgccaagatatttataccctcagcactcggggcaacacagtggaaagtggggaggccatagacccaaacaagttctttgggccaggcatggcctagtaagtacaccatgcctcgaaaataagtccagaagcactggactaaagagtgctaatgcaggaaataatacacataatttttaggtaaggataataatttatctctgctcctaatattactatcccattgtaattatttataaccctcaagccagttgatttttaatatatttgattggaaaagaactctctggtattattaagactcacacagaatcagggacagggcccccaaaggagtttgctgtaaaataggcagtagagttgtggcatgggcccaaccctgcattcaagtgtaacagcattctgtcagggtcactttgaattgtgcacataagaaaaccaatacaaaaaacaatttgtattcaatattgtcacatttctctctggtagaaaaatcaaataccttagagattatgaagtcattaatttatactgaaattggattgacttactacctaacactgagcgctgtttttaaatgaaaagaatgagatttataaccacttgagtgttattgcagtgatatttgaactcatttgaatatattcagtatcatttaatgtctgaattcagaaaaaaatgccgaaatttttattcagatggtccataaattaaattgcatattcattacttatctgctctatttagatttattttaaaagtttatttaagtaaatatttttataaaaaccagaaaacactgtattacaaaatattatttattaaatgtagttcaggaaataatctatttttactcttttttgggaaatacttgtgtttttgatacatctccatgaagttcttttgagaggagaggctattttgatgtttttatacaactgaaggttaacagccatagcattttatgatactttacaggtagtcctggctttttccctgaaacataagcttggaaaatctattagaaagcagaacagggcaaactctccattttacttatggcttttctaatttttaattaattaatttatttttttgagacagagtcttgttctgtcgccaggctggagtgcagtggcacaatctcggctctcggctcactgcaacctctgcctcccaggttcaagcgattctcctgcctcagcctcccgagtacctgggactacaggcatgtgccacagttcccggctaatttttgtatttttagtagagacggggtttcaccatgttggccaggatggtctcaatctcttgacctcgtgatctgcctgccttggcctcccaaagtgctgggattacaggtgtgagccaccacgcctggccggcttatttttatccacagtaaatcttcagcaactcattgtctccaccagatagtatttttctgtaaatgaaatgctgacttcgcctcttcctgctgtatgctcatccctgcactgagcacagatatgacaagcagtagccatgggggaggtgggtgacaaagataggaccccgggagggggcgcaggtacatgctagtttcaattaccacagtattctagagacgggttgcaatgacaaggggggcaaatgaaatcaatgcaagatttcttaataatgggcagacagaaaaatgtaaaaccacacaaaacggactgctgataatattttaaaatatacttatttgtcttctttttgcattgtgaaaaaaacaaaataaattttgtgtgataattttgatgatgaaaggtggaagttctacctagatttgaatgagtgtttttttaagggaatgagaatgtcatggtgctaaacctgacaaataagagatcattgaaatgctgaaaattttaacagtcttcttaaaagtattgagggggcaaaaattaccaattatggtatacaaaaataagcctataaatgtgtttcacattgctaacttgagtttcagttgattcagtttgtaataactagtaatgagcttctgtttacaataaaaattctgtaaattg

SEQ ID NO: 14781 - DNA, 4103 bp, Homo sapiens
ggagccctgggcgcgggggcggcgtgtcaggtggttgcggagctggtaagaatcatattctaagaactcagccactcaggtatccaccatggtgctgggtcctgaacagaagatgtcagatgacagtgtttctggagatcatggggagtctgccagtcttggtaacatcaaccctgcctatagtaatccctctctttcacagtcccctggggactcagaggagtacttcgccacttactttaatgagaagatctccattcctgaggaggagtactcttgttttagctttcgtaaactctgggctttcaccggaccaggttttcttatgagcattgcctacctggatccaggaaatattgaatccgatttgcagtctggagcagtggctggatttaagttgctctggatccttctgttggccacccttgtggggctgctgctccagcggcttgcagctagactgggagtggttactgggctgcatcttgctgaagtatgtcaccgtcagtatcccaaggtcccacgagtcatcctgtggctgatggtggagttggctatcatcggctcagacatgcaagaagtcattggctcagccattgctatcaatcttctgtctgtaggaagaattcctctgtggggtggcgttctcatcaccattgcagatacttttgtatttctcttcttggacaaatatggcttgcggaagctagaagcattttttggctttctcatcactattatggccctcacatttggatatgagtatgttacagtgaaacccagccagagccaggtactcaagggcatgttcgtaccatcctgttcaggctgtcgcactccacagattgaacaggctgtgggcatcgtgggagctgtcatcatgccacacaacatgtacctgcattctgccttagtcaagtctagacaggtaaaccggaacaataagcaggaagttcgagaagccaataagtactttttcattgaatcctgcattgcactctttgtttccttcatcatcaatgtctttgttgtctcagtctttgctgaagcattttttgggaaaaccaacgagcaggtggttgaagtctgtacaaataccagcagtcctcatgctggcctctttcctaaagataactcgacactggctgtggacatctacaaagggggtgttgtgctgggatgttactttgggcctgctgcactctacatttgggcagtggggatcctggctgcaggacagagctccaccatgacaggaacctattctggccagtttgtcatggagggattcctgaacctaaagtggtcacgctttgcccgagtggttctgactcgctctattgccatcatccccactctgcttgttgctgtcttccaagatgtagagcatctaacagggatgaatgactttctgaatgttctacagagcttacagcttccctttgctctcatacccatcctcacatttacgagcttgcggccagtaatgagtgactttgccaatggactaggctggcggattgcaggaggaatcttggtccttatcatctgttccatcaatatgtactttgtagtggtttatgtccgggacctagggcatgtggcattatatgtggtggctgctgtggtcagcgtggcttatctgggctttgtgttctacttgggttggcaatgtttgattgcactgggcatgtccttcctggactgtgggcatacggtaagcatctctaaaggcctgctgacagaagaagccacccgtggctacgttaaataacactggattagtctgtcttctgcaggtagccatcagagccagtgtgtttctatggtttactgtgtgaacatagccaaaagtatgtgccgttgcacagactgtgtttatgactcaaccgttggttggaaaagactttgtttcatgtgtatttgaaagatggaattattttttccttcctgacctaaccttagaactggattagggtgggatctttgaaaagctgacatttgctgctatcattccaacactaaattcttaagtagttgcccaagggccagctcagtttatccttcggagagacaaggatatgcatgattcttaaccaggctatatgttaaaaaaaaattggaaaatgcaatacattttttattatacaaactacagaatgagtatgcaagttttatttatcaaaatgtaatggatttttaaaggctgagaaattttccttatacctaccttttcagttattttaattataccaaattatcaactagaatagcttcatccatatgaaatataaaatgaagagacacctagctctatcaggcttaggattctttgaacttatttccactttaatttctcagtggaagttaagaggggtgagaaaacaaagaaggggaaaaactgacaactaacaaaaccagcaccacatcgctaggtggtgcttactaattaccttctcaggattttcctcagattgaaaagcttatgaggatttcttgggagtcttaataacctgcctgttagtacagagctttcctgatgatatttactcttgagcacatgtggttgtaaaaccttaactttctttctccaggagggtggtgatagaaacagatggtagtatttatgaactgatgttctcgtgaaatgttgagggtggggagaaaagactttaagggaggagagccatctattttgttcctaaagccacctctcagcagaatcgtcatgtttttctgatgcaccgctctgcttcatgcccaagatgacttgcgaggcaatctcaggagctgtggacttaaccgttgcaaagcacactgtctttctcagcgttctctgcaagtcagtaggtgttagtatggttgcaaagttcactgtctcagcaaagttgaactgggctacctctctacagctgtttcctcagagggaaaaatcttgagaccatggtggagctctggagtcagaggaaatgggtgtcttcagcacaaagctgctgcttttacttcagccacttctgacatttttacataccgagcctgagattgtgtgattatctcaaatcaaatcactttgatggagataaataatcaaaactgttttatagtcattgatttggtgagaacagtaatggaaaatggtgttgaaggacttctcatttttggagctttccttccagagtcctggctgattggtgttcgctgttcatctgagcccccaaaagcattattactgatacttgcacacagtcaaaagcgcagactggatggatggtcttttataaggcatttaagggtacactactgtgtttcactgaccatacatttttcttagcccctcaagtaatatagcacagagttatgaatgacaattcccctaaccattcctcttcatatctgcctcttccccttaccatcgtaattctccaaactggtcataaaggcactctgtgaagatattggggactgacatcttaagctctcacctggctgcagtaggaaaggccaaactgacgacaaaaaaaaaattctttataaagatgatatggtaacatgtatctttgccctgggtctgggtgggtccagtcagtctcagatttacaagcatttaggagcctaggtaaaagctgctagtattcttttaaaagttatatttatgacttgcaatgatagaaaactccttccaattaaatggcattttataatattatgtgtgtacttcacagtgttaaaaataccctcatacgttattgcatttgatcttcacagaaagtgcattttaaccagtactctgggtgcaataaataatatgtagaaatttaagtcctccaattccagcatatccagtgagttttgacagtgtgtttatgtggaatgtttaaggatatacaattgtactttatataaattggttcttgttcttcttaaatgtgacatgaaataattgtgctgctacattatactggaaattaacaggggaaaagggaagagctcttggctcccttgaggttctgctagtggtgttaggagtggttacaactgagcttttagtaaccatttaaccgtatgtaaacttggtttctaattaaaaaaaaatttctttttcc

SEQ ID NO: 14782 - DNA, 5766 bp, Homo sapiens
cgccgccgcagccgccgccaccaacgccaacaacaacgtgtcgggagcagccgcggccgaagccggagcaggggccggagtcgcggctggagtggggcctgcgcgtgtgagtggccgagagttgcccgtgccggagacctcaaactccgggcgggagcgctttcggtgggccgagccgccgtcgcccgcggcaccgtgtccccaaggcccagacagcggggcgggggtctatcaggcgcgggactggcttctctcaggccgacccttctagccgggctccggatcttcctcggcctcgggcccccttcacgttcaggacggaggccggagaacggtgatcatcacacaccccagccggcttcctggccagggcattttctctgcggccaagcagtgttgggattgtagctgctgggagccccctcctgccgccacctctcctgcaaggaagggactgacgcgttcccactttcttactctgcacctccccactctcttcccattcaagaacgagtttctcttccctctccattggaaatcctgctccggaggtccaaaacacgtattttaagcgtgcccttcctcacctcctggagcacccttagaagtattgcctacttatccgggctgagaatccttcatttttgacctggcttttttttcgccctttgggagataaaggtccctctccaccctctactaacactctgcacccaaggccttatcctttggggtcaccagctccttggccatttctatgtgatttcccccacccatctgagttccagtttcctctgggctccaatctccagtccctggcggatctggtcagtcccacccctaggtgggagtgaccagggggctctggcccaggattcccaaccctggaaggcagctccaaggcaggaagagaattgggcatcgggtacgaacctggcagctcaggagtcggggctccactcaccccacacaaaaagatgaaaaagcgcaaagagctcaatgcattgattggtttggctggggacagccggagaaagaagcccaagaaaggcccaagcagtcaccgcctgcttcgcactgagcctcccgactcagactctgagtccagctccgaagaggaagaggaattcggtgtggttggaaatcgctctcgctttgccaagggagactatttacgatgctgcaagatctgttatccgctctgtggttttgtcatccttgctgcctgtgttgtggcctgtgttggcttggtgtggatgcaggttgctctcaaggaggatctggatgccctcaaggaaaaatttcgaacaatggaatctaatcagaaaagctcattccaagaaatccccaaacttaatgaagaactactcagcaagcaaaaacaacttgagaagattgaatctggagagatgggtttgaacaaagtctggataaacatcacagaaatgaataagcagatttctctgttgacttctgcagtgaaccacctcaaagccaatgttaagtcagctgcagacttgattagcctgcctaccactgtagagggacttcagaagagtgtagcttccattggcaatactttaaacagcgtccatcttgctgtggaagcactacagaaaactgtggatgaacacaagaaaacgatggaattactgcagagtgatatgaatcagcacttcttgaaggagactcctggaagcaaccagatcattccgtcaccttcagccacatcagaacttgacaataaaacccacagtgagaatttgaaacaggatatcctgtaccttcacaactctttagaggaggtaaacagtgccctagtggggtaccagagacagaatgatcttaaactcgagggaatgaacgagacagtcagtaatcttacccagagagtcaacctgatagaaagcgatgtggttgctatgagcaaggtagaaaagaaagcaaacctgtccttcagcatgatgggtgatagatctgccactctgaaaagacagtctttggatcaagtcaccaacagaacagatacagtaaaaatccaaagcataaagaaagaagatagttcaaattctcaggtatccaagctaagagagaaactccagctgatcagtgctcttacaaacaaacctgagagcaacaggcctccagagaccgccgatgaagagcaagtagagagtttcacatcaaagccatcagcattgccaaaattttcacagtttcttggagacccagttgagaaagctgcccaactaagacctatctccctaccaggagtttctagcactgaagatcttcaggatttattccgcaagactggccaggacgtggatgggaagctgacctaccaggaaatctggacctccctaggttctgctatgccagaaccagagagcttgagagcatttgattccgatggagatggaagatactcattcctggagctaagggtagctttaggtatctagcttcatcaggcatattttagaaatggactgcctaatatctatttacctaacaacaaaacaacccttacttacccatcagtcctctagtcctccaaactactgtagcagatactttgccaccttttaacttgtttgaagaagctatataaaagttatttttttaaagaagaagaccattttacttatgatgttcagaaatctatgatttcctacaaccagtaagatcttacattttaaaattgccagaaaaaaaattaaagccctctttttttctctttcctttttttgaggggaggagaccttatcttttaaagctgggaaatgtatatagagagagaataagccacttttatatttcacttaaatttgccttaaattagctgcactttatagagactcagaaaatgtcttttctttaaaagataggccttttctgtttgtaaatatttaaatgaaagaaagcattgtgcatattgtgtggaaagtaggaagaatggttttgaacaggatatgaacaaatgacttattaaaaattgctgatctggtgtaggtggcagctgaaactacatccatgtctccataaggcatccctcaaaggcccaggcgctgccagggggtttgtcctggtagctggaggaaccgatttcagggaatagacactggagacaatactgactccaggcatggctcatggaagtaggattctggttctttgttcctattccctcagctaatcccaacctgggaatcagagaagtcttggggatttttctcatttttagtactatttcagggtttatgagcataaaaagttatccattggggagctccattttccctgctgagtgagctagattgccttccccacccacccacttaagtctgtcttaaagccgtagctggctcccaccaccagtaccatctccatttgaatggcagggctaaattcccccagccattatctcacactgaccacccagagctttagaagagagctgtgcttctaattttgacccagaaaaccataccccttgagattttacctagaggctaaccaagagcctaatatgtttctctgggggatgactaaagccaaaaaggctgtgagatgaaacatgtgaaataatattcagtttccttaccattaccagctcagaagtagctagaggctttctacccaaaggatgccaaagtatagcagggcaggcctggagctagggccttcacatggtggtagcaagtttttcaaatctaatacaatcaagtacaatacttcctttaaatgcttctgtggacctggcatgaaagatccctagattgaaaggaataatacctccatgtctcctgtatgttgagtctagaattgctgtgttgttcttagaagcagtctttgggcaacaacttgaaaggggaaaaaaaaactacaaaaacttaactttggtataggccaagtcagggagaaagtagagaaagctgtcatgccacagacttctttagtggagatcatttcctttttaactttgttcaggttgcccttcaccatggatacagtccggtacccttaaacatttaagggctgtttttttttttctttatatgatgttcagcttggtattaaccaaacttaaattttttttccagaagtattaaaatttagttaaagcaagatgaagtcttttcccatgaatgtgtccccttatctcattatagcttatgctcagtttcactttcttggaaaggttaaaacaaattagcctggcactttaggtaacttgaaaataactctcacccttctgactgccttccatccactctcaccccacacctttttttaatatatatacacccttacagattttctaacaaccaaataaaattctagcaataaattgaattatactgctatatttgtatatactgtaccataaatagtatgtctgtacctggaaggtatttttttgagaactgatttatatgaaatatacttgagggtaatgtagcttgtcctttttagtttcaaattcttattcataggcagatactttgaagacaccttaactctttgttgtgtgtattttcccttgcatcagataactatacatggagaaatccattttgttttttggtttatcttctgttcttcctaccttgtgcttgtctgactagtatcacccctgagccagtatacagtaccatcctctccccctaccaagtttggcagaggtgtttatactgcattctcagatctatgaatatttttgtcatcctgcctgagaaagtacatcttccaggcaaaagtagggtatcttgaactcctttcttctgagttgagcagactcactggcttaagcatcccataagcctattatttagtgtgaatttgggacttttatttgtatgttgtcttaacttactgagcctgtgacttgtatttagctgtagtcaagcctcaccagccatatctcatctctgagaggaagactggatagtgagtttggttttggttttggttttaaacccttttaccttttcagtctggcagctcctactgctgctttcctaagttactcaaagcactgcttcttggtccttgttttcttttgccttgtactatcttgtataatgtttactaaaagagcctccccataaatcagagaggcaaaaaggtagcatataaaaagaagaaccaaaagaagagaaaacctgacttctagatgactgtggtgtcatctaaaaggcagaggtgcctgaccctcaggaatgtgtatgatgcaacagagctgaagaatgggttcccttcacctactgctggccattgtcccttctgttggagattcctttctttatggttgctgttcataaccccttcaacacccccccttgctggtcctgccggtcacagttgaggattttggctgtgatgggctcatactcataatggcctgttgagttgtttttagtgacaggttttgtttgctgcacacctcattggcttgcttaccaacaccagctagaagtggtccctctttcatatccaaaccagaacacatttgggtattcctgagactttatagagcgtgtattgtttgttatacgaacctaacctaccttgttgttttctcatattaagaaatttaaatctactttgttttagtgaagctattttggtaatgtataagcaattttggttctgtttagggagaattcagggtttccatgacttgatttgagctttgcatatttcaaataagtaacacagccattttaatttagctaaataaaaaaatttcttttttctctc

SEQ ID NO: 14783 - DNA, 7008 bp, Homo sapiens
gagcgctccaagatggcgcccaccgcagtcccgcccgccgcatcctcggcgcctttgcagtccggccgcgcctcccgggccccgcgttagggccgccgctgcctccctcgccgccgccgctgccagctgacctgtcctggacgcagcataactaacgaagctgctgcaggatgagaagatggcagcgcggctgcttgcaccaccaggccctgatagtttcaagcctttcacccctgagtcactggcaaacattgagaggcgcattgctgagagcaagctcaagaaaccaccaaaggccgatggcagtcatcgggaggacgatgaggacagcaagcccaagccaaacagcgacctggaagcagggaagagtttgcctttcatctacggggacatcccccaaggcctggttgcagttcccctggaggactttgacccatactatttgacgcagaaaacctttgtagtattaaacagagggaaaactctcttcagatttagtgccacgcctgccttgtacattttaagtccttttaacctgataagaagaatagctattaaaattttgatacattcagtatttagcatgatcattatgtgcactattttgaccaactgtgtattcatgacttttagtaaccctcctgactggtcgaagaatgtggagtacacgttcacagggatttatacatttgaatcactagtgaaaatcattgcaagaggtttctgcatagatggctttacctttttacgggatccatggaactggttagatttcagtgtcatcatgatggcgtatataacagagtttgtaaacctaggcaatgtttcagctctacgcactttcagggtactgagggctttgaaaactatttcggtaatcccaggcctgaagacaattgtgggtgccctgattcagtctgtgaagaaactgtcagatgtgatgatcctgacagtgttctgcctgagtgtttttgccttgatcggactgcagctgttcatggggaaccttcgaaacaagtgtgttgtgtggcccataaacttcaacgagagctatcttgaaaatggcaccaaaggctttgattgggaagagtatatcaacaataaaacaaatttctacacagttcctggcatgctggaacctttactctgtgggaacagttctgatgctgggcaatgcccagagggataccagtgtatgaaagcaggaaggaaccccaactatggttacacaagttttgacacttttagctgggccttcttggcattatttcgccttatgacccaggactattgggaaaacttgtatcaattgactttacgagcagccgggaaaacatacatgatcttcttcgtcttggtcatctttgtgggttctttctatctggtgaacttgatcttggctgtggtggccatggcttatgaagaacagaatcaggcaacactggaggaggcagaacaaaaagaggctgaatttaaagcaatgttggagcaacttaagaagcaacaggaagaggcacaggctgctgcgatggccacttcagcaggaactgtctcagaagatgccatagaggaagaaggtgaagaaggagggggctcccctcggagctcttctgaaatctctaaactcagctcaaagagtgcaaaggaaagacgtaacaggagaaagaagaggaagcaaaaggaactctctgaaggagaggagaaaggggatcccgagaaggtgtttaagtcagagtcagaagatggcatgagaaggaaggcctttcggctgccagacaacagaatagggaggaaattttccatcatgaatcagtcactgctcagcatcccaggctcgcccttcctctcccgccacaacagcaagagcagcatcttcagtttcaggggacctgggcggttccgagacccgggctccgagaatgagttcgcggatgacgagcacagcacggtggaggagagcgagggccgccgggactccctcttcatccccatccgggcccgcgagcgccggagcagctacagcggctacagcggctacagccagggcagccgctcctcgcgcatcttccccagcctgcggcgcagcgtgaagcgcaacagcacggtggactgcaacggcgtggtgtccctcatcggcggccccggctcccacatcggcgggcgtctcctgccagaggctacaactgaggtggaaattaagaagaaaggccctggatctcttttagtttccatggaccaattagcctcctacgggcggaaggacagaatcaacagtataatgagtgttgttacaaatacactagtagaagaactggaagagtctcagagaaagtgcccgccatgctggtataaatttgccaacactttcctcatctgggagtgccacccctactggataaaactgaaagagattgtgaacttgatagttatggacccttttgtggatttagccatcaccatctgcatcgtcctgaatacactgtttatggcaatggagcaccatcctatgacaccacaatttgaacatgtcttggctgtaggaaatctggttttcactggaattttcacagcggaaatgttcctgaagctcatagccatggatccctactattatttccaagaaggttggaacatttttgacggatttattgtctccctcagtttaatggaactgagtctagcagacgtggaggggctttcagtgctgcgatctttccgattgctccgagtcttcaaattggccaaatcctggcccaccctgaacatgctaatcaagattattggaaattcagtgggtgccctgggcaacctgacactggtgctggccattattgtcttcatctttgccgtggtggggatgcaactctttggaaaaagctacaaagagtgtgtctgcaagatcaaccaggactgtgaactccctcgctggcatatgcatgactttttccattccttcctcattgtctttcgagtgttgtgcggggagtggattgagaccatgtgggactgcatggaagtggcaggccaggccatgtgcctcattgtctttatgatggtcatggtgattggcaacttggtggtgctgaacctgtttctggccttgctcctgagctccttcagtgcagacaacctggctgccacagatgacgatggggaaatgaacaacctccagatctcagtgatccgtatcaagaagggtgtggcctggaccaaactaaaggtgcacgccttcatgcaggcccactttaagcagcgtgaggctgatgaggtgaagcctctggatgagttgtatgaaaagaaggccaactgtatcgccaatcacaccggtgcagacatccaccggaatggtgacttccagaagaatggcaatggcacaaccagcggcattggcagcagcgtggagaagtacatcattgatgaggaccacatgtccttcatcaacaaccccaacttgactgtacgggtacccattgctgtgggcgagtctgactttgagaacctcaacacagaggatgttagcagcgagtcggatcctgaaggcagcaaagataaactagatgacaccagctcctctgaaggaagcaccattgatatcaaaccagaagtagaagaggtccctgtggaacagcctgaggaatacttggatccagatgcctgcttcacagaaggttgtgtccagcggttcaagtgctgccaggtcaacatcgaggaagggctaggcaagtcttggtggatcctgcggaaaacctgcttcctcatcgtggagcacaactggtttgagaccttcatcatcttcatgattctgctgagcagtggcgccctggccttcgaggacatctacattgagcagagaaagaccatccgcaccatcctggaatatgctgacaaagtcttcacctatatcttcatcctggagatgttgctcaagtggacagcctatggcttcgtcaagttcttcaccaatgcctggtgttggctggacttcctcattgtggctgtctctttagtcagccttatagctaatgccctgggctactcggaactaggtgccataaagtcccttaggaccctaagagctttgagacccttaagagccttatcacgatttgaagggatgagggtggtggtgaatgccttggtgggcgccatcccctccatcatgaatgtgctgctggtgtgtctcatcttctggctgattttcagcatcatgggagttaacttgtttgcgggaaagtaccactactgctttaatgagacttctgaaatccgatttgaaattgaagatgtcaacaataaaactgaatgtgaaaagcttatggaggggaacaatacagagatcagatggaagaacgtgaagatcaactttgacaatgttggggcaggatacctggcccttcttcaagtagcaaccttcaaaggctggatggacatcatgtatgcagctgtagattcccggaagcctgatgagcagcctaagtatgaggacaatatctacatgtacatctattttgtcatcttcatcatcttcggctccttcttcaccctgaacctgttcattggtgtcatcattgataacttcaatcaacaaaagaaaaagttcggaggtcaggacatcttcatgaccgaagaacagaagaagtactacaatgccatgaaaaagctgggctcaaagaagccacagaaacccattccccgccccttgaacaaaatccaaggaatcgtctttgattttgtcactcagcaagcctttgacattgttatcatgatgctcatctgccttaacatggtgacaatgatggtggagacagacactcaaagcaagcagatggagaacatcctctactggattaacctggtgtttgttatcttcttcacctgtgagtgtgtgctcaaaatgtttgcgttgaggcactactacttcaccattggctggaacatcttcgacttcgtggtagtcatcctctccattgtgggaatgttcctggcagatataattgagaaatactttgtttccccaaccctattccgagtcatccgattggcccgtattgggcgcatcttgcgtctgatcaaaggcgccaaagggattcgtaccctgctctttgccttaatgatgtccttgcctgccctgttcaacatcggccttctgctcttcctggtcatgttcatcttctccatttttgggatgtccaattttgcatatgtgaagcacgaggctggtatcgatgacatgttcaactttgagacatttggcaacagcatgatctgcctgtttcaaatcacaacctcagctggttgggatggcctgctgctgcccatcctaaaccgcccccctgactgcagcctagataaggaacacccagggagtggctttaagggagattgtgggaacccctcagtgggcatcttcttctttgtaagctacatcatcatctctttcctaattgtcgtgaacatgtacattgccatcatcctggagaacttcagtgtagccacagaggaaagtgcagaccctctgagtgaggatgactttgagaccttctatgagatctgggagaagttcgaccccgatgccacccagttcattgagtactgtaagctggcagactttgcagatgccttggagcatcctctccgagtgcccaagccaaataccattgagctcatcgctatggatctgccaatggtgagcggggatcgcatccactgcttggacatcctttttgccttcaccaagcgggtcctgggagatagcggggagttggacatcctgcggcagcagatggaagagcggttcgtggcatccaatccttccaaagtgtcttacgagccaatcacaaccacactgcgtcgcaagcaggaggaggtatctgcagtggtcctgcagcgtgcctaccggggacatttggcaaggcggggcttcatctgcaaaaagacaacttctaataagctggagaatggaggcacacaccgggagaaaaaagagagcaccccatctacagcctccctcccgtcctatgacagtgtaactaaacctgaaaaggagaaacagcagcgggcagaggaaggaagaagggaaagagccaaaagacaaaaagaggtcagagaatccaagtgttagaggagaacaaaaattcagtattatacagatctaaaactcgcaagtgaaagattgtttacaaacttcctgaatattatcaatgcagaacagctgtggagactctaacctgaagatctataccaaacgtcgtctgcttaccacgtaacacagctgcatcttgagcagtgacctgccaagggcaaaggaccccgctccctagacttacagattttctaatgcttgggcaggtggttactgcatgttccacatcagtcaatgcaacttaggacaaaactaaccagatacagaaacagaagagaggctgccgggaccagcatatttccgttgcagccaaatggattttattttttcattttattgattctcagaagcagaaagcatcactttaaaagttcgtttgttcatgcaaactatatttgcattcttacattagttaagctaagcagcaaaaagaaaacacacacacacactcacatttagcccatgtcatttaattgtcagtttctttgacataaagcgcatcttctccacatgggcttcacgtggtttggagatgggtgggggaaaacaatcaggtttcttcaggctgaggaggacttgctcaggccgattccaaacattgtgctcgttcaatgcgtagaaatgatttgcatgatggcatgccgtgatcagaagtcatgcatgagatccatacaccacaggacactactaatctagtcccttgcactgggtcagcctttggacaggacccagccctgcaccgttcactgtatttggagaaaatggtaagagttccataccgggctacaattctttgagttcttaaaagtccttcatacaccttctgggtagggaaacaaccaactaattgactaacaccaccaacg

SEQ ID NO: 14784 - DNA, 2436 bp, Homo sapiens
agtttcaccagaaaccagggggagaaggcggccgagccccagctctccgagcaccgggtcggaagccgcgacccgagccgcgcaggaagctgggaccggaacctcggcggacccggccccacccaactcacctgcgcaggtcaccagcaccctcggaacccagaggcccgcgctctgaaggtgacccccctggggaggaaggcgatggcccctgcgaggacgatggcccgcgcccgcctcgccccggccggcatccctgccgtcgccttgtggcttctgtgcacgctcggcctccagggcacccaggccgggccaccgcccgcgccccctgggctgcccgcgggagccgactgcctgaacagctttaccgccggggtgcctggcttcgtgctggacaccaacgcctcggtcagcaacggagctaccttcctggagtcccccaccgtgcgccggggctgggactgcgtgcgcgcctgctgcaccacccagaactgcaacttggcgctagtggagctgcagcccgaccgcggggaggacgccatcgccgcctgcttcctcatcaactgcctctacgagcagaacttcgtgtgcaagttcgcgcccagggagggcttcatcaactacctcacgagggaagtgtaccgctcctaccgccagctgcggacccagggctttggagggtctgggatccccaaggcctgggcaggcatagacttgaaggtacaaccccaggaacccctggtgctgaaggatgtggaaaacacagattggcgcctactgcggggtgacacggatgtcagggtagagaggaaagacccaaaccaggtggaactgtggggactcaaggaaggcacctacctgttccagctgacagtgactagctcagaccacccagaggacacggccaacgtcacagtcactgtgctgtccaccaagcagacagaagactactgcctcgcatccaacaaggtgggtcgctgccggggctctttcccacgctggtactatgaccccacggagcagatctgcaagagtttcgtttatggaggctgcttgggcaacaagaacaactaccttcgggaagaagagtgcattctagcctgtcggggtgtgcaaggcccctccatggaaaggcgccatccagtgtgctctggcacctgtcagcccacccagttccgctgcagcaatggctgctgcatcgacagtttcctggagtgtgacgacacccccaactgccccgacgcctccgacgaggctgcctgtgaaaaatacacgagtggctttgacgagctccagcgcatccatttccccagtgacaaagggcactgcgtggacctgccagacacaggactctgcaaggagagcatcccgcgctggtactacaaccccttcagcgaacactgcgcccgctttacctatggtggttgttacggcaacaagaacaactttgaggaagagcagcagtgcctcgagtcttgtcgcggcatctccaagaaggatgtgtttggcctgaggcgggaaatccccattcccagcacaggctctgtggagatggctgtcgcagtgttcctggtcatctgcattgtggtggtggtagccatcttgggttactgcttcttcaagaaccagagaaaggacttccacggacaccaccaccacccaccacccacccctgccagctccactgtctccactaccgaggacacggagcacctggtctataaccacaccacgcggcccctctgagcctgggtctcaccggctctcacctggccctgcttcctgcttgccaaggcagaggcctgggctgggaaaaactttggaaccagactcttgcctgtttcccaggcccactgtgcctcagagaccagggctccagcccctcttggagaagtctcagctaagctcacgtcctgagaaagctcaaaggtttggaaggagcagaaaacccttgggccagaagtaccagactagatggacctgcctgcataggagtttggaggaagttggagttttgtttcctctgttcaaagctgcctgtccctaccccatggtgctaggaagaggagtggggtggtgtcagaccctggaggccccaaccctgtcctcccgagctcctcttccatgctgtgcgcccagggctgggaggaaggacttccctgtgtagtttgtgctgtaaagagttgctttttgtttatttaatgctgtggcatgggtgaagaggaggggaagaggcctgtttggcctctctatcctctcttcctcttcccccaagattgagctctctgcccttgatcagccccaccctggcctagaccagcagacagagccaggagaagctcagctgcattccgcagcccccacccccaaggttctccaacatcacagcccagcccgcccactgggtaataaaagtggtttgtggaaaaaaaaaaa

SEQ ID NO: 14785 - DNA, 2484 bp, Homo sapiens
agtttcaccagaaaccagggggagaaggcggccgagccccagctctccgagcaccgggtcggaagccgcgacccgagccgcgcaggaagctgggaccggaacctcggcggacccggccccacccaactcacctgcgcaggtcaccagcaccctcggaacccagaggcccgcgctctgaaggtgacccccctggggaggaaggcgatggcccctgcgaggacgatggcccgcgcccgcctcgccccggccggcatccctgccgtcgccttgtggcttctgtgcacgctcggcctccagggcacccaggccgggccaccgcccgcgccccctgggctgcccgcgggagccgactgcctgaacagctttaccgccggggtgcctggcttcgtgctggacaccaacgcctcggtcagcaacggagctaccttcctggagtcccccaccgtgcgccggggctgggactgcgtgcgcgcctgctgcaccacccagaactgcaacttggcgctagtggagctgcagcccgaccgcggggaggacgccatcgccgcctgcttcctcatcaactgcctctacgagcagaacttcgtgtgcaagttcgcgcccagggagggcttcatcaactacctcacgagggaagtgtaccgctcctaccgccagctgcggacccagggctttggagggtctgggatccccaaggcctgggcaggcatagacttgaaggtacaaccccaggaacccctggtgctgaaggatgtggaaaacacagattggcgcctactgcggggtgacacggatgtcagggtagagaggaaagacccaaaccaggtggaactgtggggactcaaggaaggcacctacctgttccagctgacagtgactagctcagaccacccagaggacacggccaacgtcacagtcactgtgctgtccaccaagcagacagaagactactgcctcgcatccaacaaggtgggtcgctgccggggctctttcccacgctggtactatgaccccacggagcagatctgcaagagtttcgtttatggaggctgcttgggcaacaagaacaactaccttcgggaagaagagtgcattctagcctgtcggggtgtgcaaggtgggcctttgagaggcagctctggggctcaggcgactttcccccagggcccctccatggaaaggcgccatccagtgtgctctggcacctgtcagcccacccagttccgctgcagcaatggctgctgcatcgacagtttcctggagtgtgacgacacccccaactgccccgacgcctccgacgaggctgcctgtgaaaaatacacgagtggctttgacgagctccagcgcatccatttccccagtgacaaagggcactgcgtggacctgccagacacaggactctgcaaggagagcatcccgcgctggtactacaaccccttcagcgaacactgcgcccgctttacctatggtggttgttacggcaacaagaacaactttgaggaagagcagcagtgcctcgagtcttgtcgcggcatctccaagaaggatgtgtttggcctgaggcgggaaatccccattcccagcacaggctctgtggagatggctgtcgcagtgttcctggtcatctgcattgtggtggtggtagccatcttgggttactgcttcttcaagaaccagagaaaggacttccacggacaccaccaccacccaccacccacccctgccagctccactgtctccactaccgaggacacggagcacctggtctataaccacaccacgcggcccctctgagcctgggtctcaccggctctcacctggccctgcttcctgcttgccaaggcagaggcctgggctgggaaaaactttggaaccagactcttgcctgtttcccaggcccactgtgcctcagagaccagggctccagcccctcttggagaagtctcagctaagctcacgtcctgagaaagctcaaaggtttggaaggagcagaaaacccttgggccagaagtaccagactagatggacctgcctgcataggagtttggaggaagttggagttttgtttcctctgttcaaagctgcctgtccctaccccatggtgctaggaagaggagtggggtggtgtcagaccctggaggccccaaccctgtcctcccgagctcctcttccatgctgtgcgcccagggctgggaggaaggacttccctgtgtagtttgtgctgtaaagagttgctttttgtttatttaatgctgtggcatgggtgaagaggaggggaagaggcctgtttggcctctctatcctctcttcctcttcccccaagattgagctctctgcccttgatcagccccaccctggcctagaccagcagacagagccaggagaagctcagctgcattccgcagcccccacccccaaggttctccaacatcacagcccagcccgcccactgggtaataaaagtggtttgtggaaaaaaaaaaa

SEQ ID NO: 14786 - DNA, 704 bp, Homo sapiens
gcagttactgagaactcataagacgaagctaaaatccctcttcggatccacagtcaaccgccctgaacacatcctgcaaaaagcccagagaaaggagcgccatggattactacagaaaatatgcagctatctttctggtcacattgtcggtgtttctgcatgttctccattccgctcctgatgtgcaggattgcccagaatgcacgctacaggaaaacccattcttctcccagccgggtgccccaatacttcagtgcatgggctgctgcttctctagagcatatcccactccactaaggtccaagaagacgatgttggtccaaaagaacgtcacctcagagtccacttgctgtgtagctaaatcatataacagggtcacagtaatggggggtttcaaagtggagaaccacacggcgtgccactgcagtacttgttattatcacaaatcttaaatgttttaccaagtgctgtcttgatgactgctgattttctggaatggaaaattaagttgtttagtgtttatggctttgtgagataaaactctccttttccttaccataccactttgacacgcttcaaggatatactgcagctttactgccttcctccttatcctacagtacaatcagcagtctagttcttttcatttggaatgaatacagcattaagcttgttccactgcaaataaagccttttaaatcatc

SEQ ID NO: 14787 - DNA, 3320 bp, Homo sapiens
gtgggtgagcggcggccacggcatcctgtgctgtgggggctacgaggaaagatctaattatcatggacctgcgacagtttcttatgtgcctgtccctgtgcacagcctttgccttgagcaaacccacagaaaagaaggaccgtgtacatcatgagcctcagctcagtgacaaggttcacaatgatgctcagagttttgattatgaccatgatgccttcttgggtgctgaagaagcaaagacctttgatcagctgacaccagaagagagcaaggaaaggcttggaaagattgtaagtaaaatagatggcgacaaggacgggtttgtcactgtggatgagctcaaagactggattaaatttgcacaaaagcgctggatttacgaggatgtagagcgacagtggaaggggcatgacctcaatgaggacggcctcgtttcctgggaggagtataaaaatgccacctacggctacgttttagatgatccagatcctgatgatggatttaactataaacagatgatggttagagatgagcggaggtttaaaatggcagacaaggatggagacctcattgccaccaaggaggagttcacagctttcctgcaccctgaggagtatgactacatgaaagatatagtagtacaggaaacaatggaagatatagataagaatgctgatggtttcattgatctagaagagtatattggtgacatgtacagccatgatgggaatactgatgagccagaatgggtaaagacagagcgagagcagtttgttgagtttcgggataagaaccgtgatgggaagatggacaaggaagagaccaaagactggatccttccctcagactatgatcatgcagaggcagaagccaggcacctggtctatgaatcagaccaaaacaaggatggcaagcttaccaaggaggagatcgttgacaagtatgacttatttgttggcagccaggccacagattttggggaggccttagtacggcatgatgagttctgagctgcggaggaaccctcatttcctcaaaagtaatttatttttacagcttctggtttcacatgaaattgtttgcgctactgagactgttactacaaactttttaagacatgaaaaggcgtaatgaaaaccatcccgtccccattcctcctcctctctgagggactggagggaagccgtgcttctgaggaacaactctaattagtacacttgtgtttgtagatttacactttgtattatgtattaacatggcgtgtttatttttgtatttttctctggttgggagtatgatatgaaggatcaagatcctccactcacacatgtagacaaacattagctctttactctttctcaaccccttatatgattttaataattctcacttcactaattttgtaagcctgagatcaataagaaatgttcaggagagaggaaagaaaaaatatatatgctccacaatttatatttagagagagaacacttagtcttgcctgtcaaaaagtccaacatttcataggtagtaggggccacatattacattcagttgctataggtccagcaactgaacctgccattacctgggcaaggaaagatccctttgctctaggaaagcttggcccaaattgattttcttctttttccccctgtaggactgactgttggctaattttgtcaagcacagctgtggtgggaagagttagggccagtgtcttgaaaatcaatcaagtagtgaatgtgatctctttgcagagctatagatagaaacagctggaaaactaaaggaaaaatacaaatgttttcggggcatacattttttttctgggtgtgcatctgttgaaatgctcaagacttaattatttgccttttgaaatcactgtaaatgcccccatccggttcctcttcttcccaggtgtgccaaggaattaatcttggtttcactacaattaaaattcactcctttccaatcatgtcattgaaagtgcctttaacgaaagaaatggtcactgaatgggaattctcttaagaaaccctgagattaaaaaaagactatttggataacttataggaaagcctagaacctcccagtagagtggggatttttttcttcttccctttctcttttggacaatagttaaattagcagtattagttatgagtttggttgcagtgttcttatcttgtgggctgatttccaaaaaccacatgctgctgaatttaccagggatcctcatacctcacaatgcaaaccacttactaccaggcctttttctgtgtccactggagagcttgagctcacactcaaagatcagaggacctacagagagggctctttggtttgaggaccatggcttacctttcctgcctttgacccatcacaccccatttcctcctctttccctctccccgctgccaaaaaaaaaaaaaaggaaacgtttatcatgaatcaacagggtttcagtccttatcaaagagagatgtggaaagagctaaagaaaccaccctttgttcccaactccactttacccatattttatgcaacacaaacactgtccttttgggtccctttcttacagatggacctcttgagaagaattatcgtattccacgtttttagccctcaggttaccaagataaatatatgtatatataacctttattattgctatatctttgtggataatacattcaggtggtgctgggtgatttattataatctgaacctaggtatatcctttggtcttccacagtcatgttgaggtgggctccctggtatggtaaaaagccaggtataatgtaacttcaccccagcctttgtactaagctcttgatagtggatatactcttttaagtttagccccaatatagggtaatggaaatttcctgccctctgggttccccatttttactattaagaagaccagtgataatttaataatgccaccaactctggcttagttaagtgagagtgtgaactgtgtggcaagagagcctcacacctcactaggtgcagagagcccaggccttatgttaaaatcatgcacttgaaaagcaaaccttaatctgcaaagacagcagcaagcattatacggtcatcttgaatgatccctttgaaattttttttttgtttgtttgtttaaatcaagcctgaggctggtgaacagtagctacacacccatattgtgtgttctgtgaatgctagctctcttgaatttggatattggttattttttatagagtgtaaaccaagttttatattctgcaatgcgaacaggtacctatctgtttctaaataaaactgtttacattcaaaaa

SEQ ID NO: 14788 - DNA, 4450 bp, Homo sapiens
agccgatgggggcggggaaaagtccggctgggccgggacaaaagccggatcccgggaagctaccggctgctggggtgctccggattttgcggggttcgtcgggcctgtggaagaagcgccgcgcacggacttcggcagaggtagagcaggtctctctgcagccatgtcggccaaggcaatttcagagcagacgggcaaagaactcctttacaagttcatctgtaccacctcagccatccagaatcggttcaagtatgctcgggtcactcctgacacagactgggcccgcttgctgcaggaccacccctggctgctcagccagaacttggtagtcaagccagaccagctgatcaaacgtcgtggaaaacttggtctcgttggggtcaacctcactctggatggggtcaagtcctggctgaagccacggctgggacaggaagccacagttggcaaggccacaggcttcctcaagaactttctgatcgagcccttcgtcccccacagtcaggctgaggagttctatgtctgcatctatgccacccgagaaggggactacgtcctgttccaccacgaggggggtgtggacgtgggtgatgtggacgccaaggcccagaagctgcttgttggcgtggatgagaaactgaatcctgaggacatcaaaaaacacctgttggtccacgcccctgaagacaagaaagaaattctggccagttttatctccggcctcttcaatttctacgaggacttgtacttcacctacctcgagatcaatccccttgtagtgaccaaagatggagtctatgtccttgacttggcggccaaggtggacgccactgccgactacatctgcaaagtgaagtggggtgacatcgagttccctccccccttcgggcgggaggcatatccagaggaagcctacattgcagacctcgatgccaaaagtggggcaagcctgaagctgaccttgctgaaccccaaagggaggatctggaccatggtggccgggggtggcgcctctgtcgtgtacagcgataccatctgtgatctagggggtgtcaacgagctggcaaactatggggagtactcaggcgcccccagcgagcagcagacctatgactatgccaagactatcctctccctcatgacccgagagaagcacccagatggcaagatcctcatcattggaggcagcatcgcaaacttcaccaacgtggctgccacgttcaagggcatcgtgagagcaattcgagattaccagggccccctgaaggagcacgaagtcacaatctttgtccgaagaggtggccccaactatcaggagggcttacgggtgatgggagaagtcgggaagaccactgggatccccatccatgtctttggcacagagactcacatgacggccattgtgggcatggccctgggccaccggcccatccccaaccagccacccacagcggcccacactgcaaacttcctcctcaacgccagcgggagcacatcgacgccagcccccagcaggacagcatctttttctgagtccagggccgatgaggtggcgcctgcaaagaaggccaagcctgccatgccacaagattcagtcccaagtccaagatccctgcaaggaaagagcaccaccctcttcagccgccacaccaaggccattgtgtggggcatgcagacccgggccgtgcaaggcatgctggactttgactatgtctgctcccgagacgagccctcagtggctgccatggtctaccctttcactggggaccacaagcagaagttttactgggggcacaaagagatcctgatccctgtcttcaagaacatggctgatgccatgaggaagcatccggaggtagatgtgctcatcaactttgcctctctccgctctgcctatgacagcaccatggagaccatgaactatgcccagatccggaccatcgccatcatagctgaaggcatccctgaggccctcacgagaaagctgatcaagaaggcggaccagaagggagtgaccatcatcggacctgccactgttggaggcatcaagcctgggtgctttaagattggcaacacaggtgggatgctggacaacatcctggcctccaaactgtaccgcccaggcagcgtggcctatgtctcacgttccggaggcatgtccaacgagctcaacaatatcatctctcggaccacggatggcgtctatgagggcgtggccattggtggggacaggtacccgggctccacattcatggatcatgtgttacgctatcaggacactccaggagtcaaaatgattgtggttcttggagagattgggggcactgaggaatataagatttgccggggcatcaaggagggccgcctcactaagcccatcgtctgctggtgcatcgggacgtgtgccaccatgttctcctctgaggtccagtttggccatgctggagcttgtgccaaccaggcttctgaaactgcagtagccaagaaccaggctttgaaggaagcaggagtgtttgtgccccggagctttgatgagcttggagagatcatccagtctgtatacgaagatctcgtggccaatggagtcattgtacctgcccaggaggtgccgcccccaaccgtgcccatggactactcctgggccagggagcttggtttgatccgcaaacctgcctcgttcatgaccagcatctgcgatgagcgaggacaggagctcatctacgcgggcatgcccatcactgaggtcttcaaggaagagatgggcattggcggggtcctcggcctcctctggttccagaaaaggttgcctaagtactcttgccagttcattgagatgtgtctgatggtgacagctgatcacgggccagccgtctctggagcccacaacaccatcatttgtgcgcgagctgggaaagacctggtctccagcctcacctcggggctgctcaccatcggggatcggtttgggggtgccttggatgcagcagccaagatgttcagtaaagcctttgacagtggcattatccccatggagtttgtgaacaagatgaagaaggaagggaagctgatcatgggcattggtcaccgagtgaagtcgataaacaacccagacatgcgagtgcagatcctcaaagattacgtcaggcagcacttccctgccactcctctgctcgattatgcactggaagtagagaagattaccacctcgaagaagccaaatcttatcctgaatgtagatggtctcatcggagtcgcatttgtagacatgcttagaaactgtgggtcctttactcgggaggaagctgatgaatatattgacattggagccctcaatggcatctttgtgctgggaaggagtatggggttcattggacactatcttgatcagaagaggctgaagcaggggctgtatcgtcatccgtgggatgatatttcatatgttcttccggaacacatgagcatgtaacagagccaggaaccctactgcagtaaactgaagacaagatctcttcccccaagaaaaagtgtacagacagctggcagtggagcctgctttatttagcaggggcctggaatgtaaacagccactggggtacaggcaccgaagaccaacatccacaggctaacaccccttcagtccacacaaagaagcttcatattttttttataagcatagaaataaaaaccaagccaatatttgtgactttgctctgctacctgctgtatttattatatggaagcatctaagtactgtcaggatggggtcttcctcattgtagggcgttaggatgttgctttctttttccattagttaaacatttttttctcctttggaggaagggaatgaaacatttatggcctcaagatactatacatttaaagcaccccaatgtctctctttttttttttttacttccctttcttcttccttatataacatgaagaacattgtattaatctgatttttaaagatctttttgtatgttacgtgttaagggcttgtttggtatcccactgaaatgttctgtgttgcagaccagagtctgtttatgtcagggggatggggccattgcatccttagccattgtcacaaaatatgtggagtagtaacttaatatgtaaagttgtaacatacatacatttaaaatggaaatgcagaaagctgtgaaatgtcttgtgtcttatgttctctgtatttatgcagctgatttgtctgtctgtaactgaagtgtgggtccaaggactcctaactactttgcatctgtaatccacaaagattctgggcagctgccacctcagtctcttctctgtattatcatagtctggtttaaataaactatatagtaacaaaaaaaaaaaaaaaaaaaaaaaaaaaaaaaaaaaaaaaaaaaaaaaaaaaaaaaaaaaaaaaaaaaaaaaaaaaaaaaaaaaaaaaaaaaaaaaaaaa

SEQ ID NO: 14789 - DNA, 4420 bp, Homo sapiens
agccgatgggggcggggaaaagtccggctgggccgggacaaaagccggatcccgggaagctaccggctgctggggtgctccggattttgcggggttcgtcgggcctgtggaagaagcgccgcgcacggacttcggcagaggtagagcaggtctctctgcagccatgtcggccaaggcaatttcagagcagacgggcaaagaactcctttacaagttcatctgtaccacctcagccatccagaatcggttcaagtatgctcgggtcactcctgacacagactgggcccgcttgctgcaggaccacccctggctgctcagccagaacttggtagtcaagccagaccagctgatcaaacgtcgtggaaaacttggtctcgttggggtcaacctcactctggatggggtcaagtcctggctgaagccacggctgggacaggaagccacagttggcaaggccacaggcttcctcaagaactttctgatcgagcccttcgtcccccacagtcaggctgaggagttctatgtctgcatctatgccacccgagaaggggactacgtcctgttccaccacgaggggggtgtggacgtgggtgatgtggacgccaaggcccagaagctgcttgttggcgtggatgagaaactgaatcctgaggacatcaaaaaacacctgttggtccacgcccctgaagacaagaaagaaattctggccagttttatctccggcctcttcaatttctacgaggacttgtacttcacctacctcgagatcaatccccttgtagtgaccaaagatggagtctatgtccttgacttggcggccaaggtggacgccactgccgactacatctgcaaagtgaagtggggtgacatcgagttccctccccccttcgggcgggaggcatatccagaggaagcctacattgcagacctcgatgccaaaagtggggcaagcctgaagctgaccttgctgaaccccaaagggaggatctggaccatggtggccgggggtggcgcctctgtcgtgtacagcgataccatctgtgatctagggggtgtcaacgagctggcaaactatggggagtactcaggcgcccccagcgagcagcagacctatgactatgccaagactatcctctccctcatgacccgagagaagcacccagatggcaagatcctcatcattggaggcagcatcgcaaacttcaccaacgtggctgccacgttcaagggcatcgtgagagcaattcgagattaccagggccccctgaaggagcacgaagtcacaatctttgtccgaagaggtggccccaactatcaggagggcttacgggtgatgggagaagtcgggaagaccactgggatccccatccatgtctttggcacagagactcacatgacggccattgtgggcatggccctgggccaccggcccatccccaaccagccacccacagcggcccacactgcaaacttcctcctcaacgccagcgggagcacatcgacgccagcccccagcaggacagcatctttttctgagtccagggccgatgaggtggcgcctgcaaagaaggccaagcctgccatgccacaaggaaagagcaccaccctcttcagccgccacaccaaggccattgtgtggggcatgcagacccgggccgtgcaaggcatgctggactttgactatgtctgctcccgagacgagccctcagtggctgccatggtctaccctttcactggggaccacaagcagaagttttactgggggcacaaagagatcctgatccctgtcttcaagaacatggctgatgccatgaggaagcatccggaggtagatgtgctcatcaactttgcctctctccgctctgcctatgacagcaccatggagaccatgaactatgcccagatccggaccatcgccatcatagctgaaggcatccctgaggccctcacgagaaagctgatcaagaaggcggaccagaagggagtgaccatcatcggacctgccactgttggaggcatcaagcctgggtgctttaagattggcaacacaggtgggatgctggacaacatcctggcctccaaactgtaccgcccaggcagcgtggcctatgtctcacgttccggaggcatgtccaacgagctcaacaatatcatctctcggaccacggatggcgtctatgagggcgtggccattggtggggacaggtacccgggctccacattcatggatcatgtgttacgctatcaggacactccaggagtcaaaatgattgtggttcttggagagattgggggcactgaggaatataagatttgccggggcatcaaggagggccgcctcactaagcccatcgtctgctggtgcatcgggacgtgtgccaccatgttctcctctgaggtccagtttggccatgctggagcttgtgccaaccaggcttctgaaactgcagtagccaagaaccaggctttgaaggaagcaggagtgtttgtgccccggagctttgatgagcttggagagatcatccagtctgtatacgaagatctcgtggccaatggagtcattgtacctgcccaggaggtgccgcccccaaccgtgcccatggactactcctgggccagggagcttggtttgatccgcaaacctgcctcgttcatgaccagcatctgcgatgagcgaggacaggagctcatctacgcgggcatgcccatcactgaggtcttcaaggaagagatgggcattggcggggtcctcggcctcctctggttccagaaaaggttgcctaagtactcttgccagttcattgagatgtgtctgatggtgacagctgatcacgggccagccgtctctggagcccacaacaccatcatttgtgcgcgagctgggaaagacctggtctccagcctcacctcggggctgctcaccatcggggatcggtttgggggtgccttggatgcagcagccaagatgttcagtaaagcctttgacagtggcattatccccatggagtttgtgaacaagatgaagaaggaagggaagctgatcatgggcattggtcaccgagtgaagtcgataaacaacccagacatgcgagtgcagatcctcaaagattacgtcaggcagcacttccctgccactcctctgctcgattatgcactggaagtagagaagattaccacctcgaagaagccaaatcttatcctgaatgtagatggtctcatcggagtcgcatttgtagacatgcttagaaactgtgggtcctttactcgggaggaagctgatgaatatattgacattggagccctcaatggcatctttgtgctgggaaggagtatggggttcattggacactatcttgatcagaagaggctgaagcaggggctgtatcgtcatccgtgggatgatatttcatatgttcttccggaacacatgagcatgtaacagagccaggaaccctactgcagtaaactgaagacaagatctcttcccccaagaaaaagtgtacagacagctggcagtggagcctgctttatttagcaggggcctggaatgtaaacagccactggggtacaggcaccgaagaccaacatccacaggctaacaccccttcagtccacacaaagaagcttcatattttttttataagcatagaaataaaaaccaagccaatatttgtgactttgctctgctacctgctgtatttattatatggaagcatctaagtactgtcaggatggggtcttcctcattgtagggcgttaggatgttgctttctttttccattagttaaacatttttttctcctttggaggaagggaatgaaacatttatggcctcaagatactatacatttaaagcaccccaatgtctctctttttttttttttacttccctttcttcttccttatataacatgaagaacattgtattaatctgatttttaaagatctttttgtatgttacgtgttaagggcttgtttggtatcccactgaaatgttctgtgttgcagaccagagtctgtttatgtcagggggatggggccattgcatccttagccattgtcacaaaatatgtggagtagtaacttaatatgtaaagttgtaacatacatacatttaaaatggaaatgcagaaagctgtgaaatgtcttgtgtcttatgttctctgtatttatgcagctgatttgtctgtctgtaactgaagtgtgggtccaaggactcctaactactttgcatctgtaatccacaaagattctgggcagctgccacctcagtctcttctctgtattatcatagtctggtttaaataaactatatagtaacaaaaaaaaaaaaaaaaaaaaaaaaaaaaaaaaaaaaaaaaaaaaaaaaaaaaaaaaaaaaaaaaaaaaaaaaaaaaaaaaaaaaaaaaaaaaaaaaaaa

SEQ ID NO: 14790 - DNA, 3324 bp, Homo sapiens
cggaggaggcccagagaccggagcgcggagacctcagccagcggcctacgcccaggcctttctccaccggaggaccagggaaccgcagtcttcatcacagaggtaccgtgctccgcgctccccgcctgacccggcccagcccgctgcggcggtgcctccttccttcctccttccctcgcgctctctctttcgcccgcccgcgccttccctgcccgcctgcgtcaccgcggccgccatggctgagaatggcgagagcagcggccccccgcgcccctcccgcggccctgctgcggcccaaggctcggctgctgccccggctgagcctaaaatcatcaaagtcacggtgaagactcccaaagagaaagaggagttcgcggtgcccgagaacagctcggttcagcagtttaaggaagcgatttcgaaacgcttcaaatcccaaaccgatcagctagtgctgatttttgccggaaaaatcttaaaagatcaagataccttgatccagcatggcatccatgatgggctgactgttcaccttgtcatcaaaagccagaaccgacctcagggccagtccacgcagcctagcaatgccgcgggaactaacactacctcggcgtcgactcccaggagtaactccacacctatttccacaaatagcaacccgtttgggttggggagcctgggaggacttgcaggccttagcagcctgggcttgagctcgaccaacttctctgagctccagagccagatgcagcagcagcttatggccagccctgagatgatgatccaaataatggaaaatccctttgttcagagcatgctttcgaatcccgatctgatgaggcagctgattatggctaatccacagatgcagcaattgattcagagaaacccagaaatcagtcacctgctcaacaacccagacataatgaggcagacactcgaaattgccaggaatccagccatgatgcaagagatgatgagaaatcaagacctggctcttagcaatctagaaagcatcccaggtggctataatgctttacggcgcatgtacactgacattcaagagccgatgctgaatgccgcacaagagcagtttgggggtaatccatttgcctccgtggggagtagttcctcctctggggaaggtacgcagccttcccgcacagaaaatcgcgatccactacccaatccatgggcaccaccgccagctacccagagttctgcaactaccagcacgaccacaagcactggtagtgggtctggcaatagttccagcaatgctactgggaacaccgttgctgccgctaattatgtcgccagcatctttagtaccccaggcatgcagagcctgctgcaacagataactgaaaacccccagctgattcagaatatgctgtcggcgccctacatgagaagcatgatgcagtcgctgagccagaatccagatttggctgcacagatgatgctgaatagcccgctgtttactgcaaatcctcagctgcaggagcagatgcggccacagctcccagccttcctgcagcagatgcagaatccagacacactatcagccatgtcaaacccaagagcaatgcaggctttaatgcagatccagcaggggctacagacattagccactgaagcacctggcctgattccgagcttcactccaggtgtgggggtgggggtgctgggaaccgctataggccctgtaggcccagtcacccccataggccccataggccctatagtcccttttacccccataggccccattgggcccataggacccactggccctgcagccccccctggctccaccggctctggtggccccacggggcctactgtgtccagcgctgcacctagtgaaaccacgagtcctacatcagaatctggacccaaccagcagttcattcagcaaatggtgcaggccctggctggagcaaatgctccacagctgccgaatccagaagtcagatttcagcaacaactggaacagctcaacgcaatggggttcttaaaccgtgaagcaaacttgcaggccctaatagcaacaggaggcgacatcaatgcagccattgaaaggctgctgggctcccagccatcgtaatcacatttctgtacctggaaaaaaaatgtatcttatttttgataatggctcttaaatctttaaacacacacacaaaatcgttctttactttcattttgattcttttaaatctgtctagttgtaagtctaatatgatgcattttaagatggagtccctccctcctacttccctcactccctttctcctttgcttatttttcctaccttcccttcctcttgtctccccactccctccctctttgtttccttccttccttatttcctttagtttccttccttagccgttttgagtggtgggaatcaatgctgtttcactcaaaagtgttgcatgcaaacacttctctttattctgcatttattgtgatttttggaaacaggtatcaaccttcacagttgggtgaacaagtgttgtcctacagatgtccaatttatttgcatttttaaacattagcctatgatagtaatttaatgtagaatgaagatattaaaaacagaagcaaattatttgaagctctctaatttgtggtacgatattgcttattgtgactttggcatgtatttttgctagcaaaatgctgtaagatttataccattgatcttttttgctatatttgtatacagtacagtaagcacaattggcactgtacatctaaaaatattacagtagaatctgagtgtaatatgtgtaaccaaaatgagaaagaatacaagaaatgtttctggagctagttatgtctcacaattttgtagaatcttacagcatctttgataaacttctcagtgaaaatgttggctaggcaagttcagttaaaatatagtagaaatgtttatcctggtatctctaagtatacatttaattgtacagaaaatttacagtgtaacattgtgtcaacatttgcagattgactgtatatgaccttaatctttgtgcagcctgaaggatcagtgtagtaatgccaggaaagtgctttttacctaagacttccttctcagcttctcccataaagagaccctaatatgcattttgatttgtaattggaaatgtaactttcactgaaagtgtcatgtgatgtttgcattacttttaactgctatgtataaaggaaagtgtgtcttttgacttcatcagttatttctcttgtgcacagagaaaaatgcattaaaaatgactaaaaaaaataaaaaattaaaaaatgaaaaaaaaaaaaaaaaaa

SEQ ID NO: 14791 - DNA, 3105 bp, Homo sapiens
gcacgagggactggggcggccacgcactccgccagaaggtcgccaggagcctccgcccttcaccttcctcggaaatccgccaggccacgcaagctccctgcccaacccttactgacgggggccacattttcccggcctccgcagccagaccttgacacaaaggacatcaaactgccgagggtaaaaaccccggaagggcggacacctccacatcgccttttgccacctttccctttatttccggagatatttattgagtgtctactgtgtgccaggcactatatctatgtgcatagaaaaaccctggaaggccatacaacaatatatatagagtgatcgtctctgcttgctgagctaacaggggtgtcaagcttccattttggtatctacttctaaatacactcagaacaggagaaatttggactaattttcaaactacagacactttctaatcatgatgcatttcaaaagtggactcgaattaactgagttgcaaaacatgacagtgcccgaggatgataacattagcaatgactccaatgatttcaccgaagtagaaaatggtcagataaatagcaagtttatttctgatcgtgaaagtagaagaagtctcacaaacagccatttggaaaaaaagaagtgtgatgagtatattccaggtacaacctccttaggcatgtctgtttttaacctaagcaacgccattatgggcagtgggattttgggactcgcctttgccctggcaaacactggaatcctactttttctggtacttttgacttcagtgacattgctgtctatatattcaataaacctcctattgatctgttcaaaagaaacaggctgcatggtgtatgaaaagctgggggaacaagtctttggcaccacagggaagttcgtaatctttggagccacctctctacagaacactggagcaatgctgagctacctcttcatcgtaaaaaatgaactaccctctgccataaagtttctaatgggaaaggaagagacattttcagcctggtacgtggatggccgcgttctggtggtgatagttacctttggcataattctccctctgtgtctcttgaagaacttagggtatcttggctatactagtggattttccttgagctgtatggtttttttcctaattgtggttatttacaagaaatttcaaattccctgcattgttccagagctaaattcaacaataagtgctaattcaacaaatgctgacacgtgtacgccaaaatatgttaccttcaattcaaagaccgtgtatgctttacccaccattgcatttgcatttgtttgccacccgtcagtcctgccaatttacagtgagcttaaagaccgatcacagaaaaaaatgcagatggtttcaaacatctcctttttcgccatgtttgttatgtacttcttgactgccatttttggctacttgacattctatgacaacgtgcagtccgacctccttcacaaatatcagagtaaagatgacattctcatcctgacagtgcggctggctgtcattgttgctgtgatcctcacagtgccggtgttatttttcacggatcgttcatctttatttgaactggctaagaaaacaaagtttaatttatgtcgtcataccgtggttacctgcatactcttggttgttatcaacttgttggtgatcttcataccctccatgaaggatatttttggagtcgtaggagttacatctgctaacatgcttattttcattcttccttcatctctttatttaaaaatcacaaccaggatggagataaaggaactcaaagaatttgggctgcccttttcttgggcctgggggtgttgttctccttggtcagcattcccttggtcatctatgactgggcctgctcatcgagtaatggtgaaggccactgaaacccgccgagaaaaagaaacatccctgttgtctgctcagtcaagtccccacacatcagcaatctctcaccacttcttttgcaagtttacagaagcaaacagaaatgtacaggatacttaaaatggaataactttttggttgcaaaacagagacatggttctataatgcttcatgtccctccaagatttgagatcaatttagggattgtgaaatttttttttcaaatttcatacaatcatatttcccagtacttttcacaatcattttttacccatctaactctatgttttgtggcttcccggtctcttagaactttgaaaacatgatatacaataatgtttatttattatacatccagattctgaaataattttcctactgatgttcagctcacactatctgtacctttttagaagagaaaagaatcttgaattgtatatatttattttgctttacagaaaaaaatggtttcgtaaataatttgcctattttgggtaacatagcacatggagataatcatctgaaagttatagggcactgccactgctgaatcagagcatgcccaatatttgaggtggctctgatttcctggcagctgaactcgggtagtccagtggcctagctggtaccacatctattcccatccagagacattctctggcaagtgttctcagctgaaaagtggttggggatgattcttaccttggtaattaaatgaagctacacatttgggtaatctagcaaatgaagtattttttccctcttggcaacttgtgtcagagttactctggtctgagtcaactttcgctggggaaaacctatggaacctactgcaaaaagattgtccaaaatgcctaagaaaatactcctctgatgcatttagccttcaaccctacctgtcttgctgaagggagaaaaatgttttagtacattataggcccagcagcttttattcatgtccaccagctagttgcacagagaatcatgtgtacctaactaaggatgatctaggataagtaactcctgttttatattgagtattttagggaagtctttaaaagacttgttttatatctataaatctaggttattacaaatacaagaattttgtaccttaaataagcctcatttctatttcttcttcattaattctccatctagtcttgtgaaaaaaaaaaaaaaaaaaa

SEQ ID NO: 14792 - DNA, 1277 bp, Homo sapiens
ggaggagggactgaggcttctggattcctgggtctgtgggaggagggactggggctcctggattcctgggtctgtgggaagagaggagtgtctgagggaggaggggctggggacaaacttccaggtctctagccttcctggcaacgccccccgaggccggacttccaggatccagcctctattgaggatttgatgcgacggcctcacggggctttggaggtgaaagaggcccagagtagagagagagagagaccgacgtacacgggatggctacgggaacgcgctatgccgggaaggtggtggtcgtgaccgggggcgggcgcggcatcggagctgggatcgtgcgcgccttcgtgaacagcggggcccgagtggttatctgcgacaaggatgagtctgggggccgggccctggagcaggagctccctggagctgtctttatcctctgtgatgtgactcaggaagatgatgtgaagaccctggtttctgagaccatccgccgatttggccgcctggattgtgttgtcaacaacgctggccaccacccacccccacagaggcctgaggagacctctgcccagggattccgccagctgctggagctgaacctactggggacgtacaccttgaccaagctcgccctcccctacctgcggaagagtcaagggaatgtcatcaacatctccagcctggtgggggcaatcggccaggcccaggcagttccctatgtggccaccaagggggcagtaacagccatgaccaaagctttggccctggatgaaagtccatatggtgtccgagtcaactgtatctccccaggaaacatctggaccccgctgtgggaggagctggcagccttaatgccagaccctagggccacaatccgagagggcatgctggcccagccactgggccgcatgggccagcccgctgaggtcggggctgcggcagtgttcctggcctccgaagccaacttctgcacgggcattgaactgctcgtgacggggggtgcagagctggggtacgggtgcaaggccagtcggagcacccccgtggacgcccccgatatcccttcctgatttctctcatttctacttggggcccccttcctaggactctcccaccccaaactccaacctgtatcagatgcagcccccaagcccttagactctaagcccagttagcaaggtgccgggtcaccctgcaggttcccataaaaacgatttgcagccagaagaaaaaaaaaaaaaaaaaaaaaaaaaaaaaaaaaaaaaaaa

SEQ ID NO: 14793 - DNA, 4295 bp, Homo sapiens
gaggaggttcctgtagggcggcacaaccagggagggcgtggaagctctgcatcccttctcccataccttgctctacacatctcttcatctgtatcctctgcagcatccttgatgataaaccagtaaatatgagttttgatcatcctgagaaaaatgggccttggcctgcagacccaataaaccttccctcccatggataatagtgctaattcctgaggacctgaagggcctgccgcccctgggggattagccagaagcaggcttgttttcctgctcagaacaaagtgacttccctgaacacatcttcattatgattcacaccaacctgaagaaaaagttcagctgctgcgtcctggtctttcttctgtttgcagtcatctgtgtgtggaaggaaaagaagaaagggagttactatgattcctttaaattgcaaaccaaggaattccaggtgttaaagagtctggggaaattggccatggggtctgattcccagtctgtatcctcaagcagcacccaggacccccacaggggccgccagaccctcggcagtctcagaggcctagccaaggccaaaccagaggcctccttccaggtgtggaacaaggacagctcttccaaaaaccttatccctaggctgcaaaagatctggaagaattacctaagcatgaacaagtacaaagtgtcctacaaggggccaggaccaggcatcaagttcagtgcagaggccctgcgctgccacctccgggaccatgtgaatgtatccatggtagaggtcacagattttcccttcaatacctctgaatgggagggttatctgcccaaggagagcattaggaccaaggctgggccttggggcaggtgtgctgttgtgtcgtcagcgggatctctgaagtcctcccaactaggcagagaaatcgatgatcatgacgcagtcctgaggtttaatggggcacccacagccaacttccaacaagatgtgggcacaaaaactaccattcgcctgatgaactctcagttggttaccacagagaagcgcttcctcaaagacagtttgtacaatgaaggaatcctaattgtatgggacccatctgtataccactcagatatcccaaagtggtaccagaatccggattataatttctttaacaactacaagacttatcgtaagctgcaccccaatcagcccttttacatcctcaagccccagatgccttgggagctatgggacattcttcaagaaatctccccagaagagattcagccaaaccccccatcctctgggatgcttggtatcatcatcatgatgacgctgtgtgaccaggtggatatttatgagttcctcccatccaagcgcaagactgacgtgtgctactactaccagaagttcttcgatagtgcctgcacgatgggtgcctaccacccgctgctctatgagaagaatttggtgaagcatctcaaccagggcacagatgaggacatctacctgcttggaaaagccacactgcctggcttccggaccattcactgctaagcacaggctcctcactcttctccatcaggcattaaatgaatggtctcttggccaccccagcctgggaagaacattttcctgaacaattccagcctgctccttttactctaggggcctctgtcagcaagaccatggggacttcaagagcctgtggtcaggaaatcaggtccagccttccctgtagccagacagtttatgagcccagagcctcctgccacacacatgcacacatatctagcattctttccagacagcatcctccccgccttccaccttggtagatgcaaggtctatctctcccatcagggctgccaaagctgggctttgtttttcccagcagaatgatgccattctcacaaaccaatgctctatattgcttgaagtctgcatctaaatattgatttcacgttttaaagaaattctcttaaattacaattgtgcccaatgcagggtggctctggggggcaagtaggtggtacaggggattggaaacatgctccgcgcctccagagaaaagttgctcccgaggtccatgcccctggaacgtgttcctatcactctggctggttgggctggtccttagactgggtgcttatgattaaagggtcttggttagcccactttccctctccatgtggagatggaaggtagagaaggatacagtgtctatcctcaagttgctacggttcagtgagagaggcagacatctgaacaggcaggtaggattcagtgtgctcagtgcactggggatttggagagagatgggcttgctctctctgtgcacccaggagggccacgcacttaaaactgtgtttgtggatcagagaaggctttatagcacagggggcattcagatgagtcttagaggaagagaagaaacatggcaagcagattacatctgagccgtttgaattgtgtttttctttcttcccatgtttattttctaagatctacctgaacttagagactcaagatatttttttaggaaacctcctacccatgtctgaggtagcaagtgcagcctcacgacagataccaggcaatccagagccacaaaacgtgattcctccaggctctgcctggcctgaccctgtcctgtcagctgggtttacataccagtcccattcttccttttcaatacctacccccaaatcttctcctaaccaccatctgttttttttttttaaagcattttttgctttaaaagcatcctgaccccaatttctttgagctcacgggccttttgctgaaggtctctcagggtgtagtggtgtggctctctggacttaacgtcactctcagaggtcagaaccttggagatcagaactgattctcaccaggtgtgagaggtgtggtagcagattgcaatgctctgcacctcttccttgcaagtgagcaacttcaggctctctgggcagaggctggcccactgtagtttgcagacatgctctccagatggttttactaagtcccctctccctgatagggaatcctgctggaccagcgcagccctggtgtggagaggttaaaagacttgcacaggatcaccaagtcatgctgtagagccaggattcctagacccagggctctgcactctcaaggctggccccatgtgctcaaggggatctaatgtttgggctccaaactaaccatctcggagctgggctcctcatttactgccaaaccctcagcttatgtagctagaaagggccctggagtgagaaagcctggattttcaaattgatgctcccctactgactagctgtgccactctgggcaaatgctcttccttgagcctgtttccacacctgtaaagtggggatgatgatcctatctcactgcttttgtgaggattacaggaaagcacctgtcctggctctgtacctggcacgtagtaggtgctcagttcatgctggtttccttcctgcctttagtagggacctgctctgtgctcacacctcggctgcatgcaccctgctgtgacggaggctagtgtggaagaggtcctgtcctcagggaattaactgtcttattgggagacaacaactgtcctccttggaacacccaagaaaccatgcaaagcagtggacaacacagaacacgccctcctcctcgctgcctgcagctccaatctgattctgcttgggaatgggcggagcacgtgggctgcttaactgctgtataggacaagccccttacccctctctgggcccatgaattcctggcttggtttatgttctgatttgacacactgattttaatcttcgaatcatgacactgagtgcagaggaggtggcattccgacagcaggacatacatgttggtgtgaagactgggacgacactgggtagaatctagtttttaattattattaatataaaggatcaaattaatttaaatatgattctgaagtctacagaacttttagttctgtgctgtctatgtggacactttggtaaaatgcaaattatgatatggacgttatcattggtctggtgagatgtttcatatttgtgacagttaatttaaaaattatgagttaatgctgcctgtgtctatggggttctgtcttctttgatagccatctattcatctggatcatgggaccctctctaatccttccaccaatcaaataagctattgctattggtttggagttgagatatcagtctcggaaacttctgaaaaatgctaataattacccaaggattatgtcaaattttaaaataaatgtgtgtgtgtttctttaaaaaaaaaaaaaaaa

SEQ ID NO: 14794 - DNA, 4403 bp, Homo sapiens
gcccggcgttaacaaagggagccgataccgaccggcgtgggcgcggagcgggcggccgccaccgagcgtgctgagcaaccgcagcctccgcggccgagagtgcagcgagcaaggggagagccagttgcgcagagccctgcaaccagcagtccagggagaagtggtgaatgtcatggagcccagctgaaatggactggcccccttgagcctgtcccaagccctggtgccaggtgtccatccccgtgctgagatgagttttgatcatcctgagaaaaatgggccttggcctgcagacccaataaaccttccctcccatggataatagtgctaattcctgaggacctgaagggcctgccgcccctgggggattagccagaagcaggcttgttttcctgctcagaacaaagtgacttccctgaacacatcttcattatgattcacaccaacctgaagaaaaagttcagctgctgcgtcctggtctttcttctgtttgcagtcatctgtgtgtggaaggaaaagaagaaagggagttactatgattcctttaaattgcaaaccaaggaattccaggtgttaaagagtctggggaaattggccatggggtctgattcccagtctgtatcctcaagcagcacccaggacccccacaggggccgccagaccctcggcagtctcagaggcctagccaaggccaaaccagaggcctccttccaggtgtggaacaaggacagctcttccaaaaaccttatccctaggctgcaaaagatctggaagaattacctaagcatgaacaagtacaaagtgtcctacaaggggccaggaccaggcatcaagttcagtgcagaggccctgcgctgccacctccgggaccatgtgaatgtatccatggtagaggtcacagattttcccttcaatacctctgaatgggagggttatctgcccaaggagagcattaggaccaaggctgggccttggggcaggtgtgctgttgtgtcgtcagcgggatctctgaagtcctcccaactaggcagagaaatcgatgatcatgacgcagtcctgaggtttaatggggcacccacagccaacttccaacaagatgtgggcacaaaaactaccattcgcctgatgaactctcagttggttaccacagagaagcgcttcctcaaagacagtttgtacaatgaaggaatcctaattgtatgggacccatctgtataccactcagatatcccaaagtggtaccagaatccggattataatttctttaacaactacaagacttatcgtaagctgcaccccaatcagcccttttacatcctcaagccccagatgccttgggagctatgggacattcttcaagaaatctccccagaagagattcagccaaaccccccatcctctgggatgcttggtatcatcatcatgatgacgctgtgtgaccaggtggatatttatgagttcctcccatccaagcgcaagactgacgtgtgctactactaccagaagttcttcgatagtgcctgcacgatgggtgcctaccacccgctgctctatgagaagaatttggtgaagcatctcaaccagggcacagatgaggacatctacctgcttggaaaagccacactgcctggcttccggaccattcactgctaagcacaggctcctcactcttctccatcaggcattaaatgaatggtctcttggccaccccagcctgggaagaacattttcctgaacaattccagcctgctccttttactctaggggcctctgtcagcaagaccatggggacttcaagagcctgtggtcaggaaatcaggtccagccttccctgtagccagacagtttatgagcccagagcctcctgccacacacatgcacacatatctagcattctttccagacagcatcctccccgccttccaccttggtagatgcaaggtctatctctcccatcagggctgccaaagctgggctttgtttttcccagcagaatgatgccattctcacaaaccaatgctctatattgcttgaagtctgcatctaaatattgatttcacgttttaaagaaattctcttaaattacaattgtgcccaatgcagggtggctctggggggcaagtaggtggtacaggggattggaaacatgctccgcgcctccagagaaaagttgctcccgaggtccatgcccctggaacgtgttcctatcactctggctggttgggctggtccttagactgggtgcttatgattaaagggtcttggttagcccactttccctctccatgtggagatggaaggtagagaaggatacagtgtctatcctcaagttgctacggttcagtgagagaggcagacatctgaacaggcaggtaggattcagtgtgctcagtgcactggggatttggagagagatgggcttgctctctctgtgcacccaggagggccacgcacttaaaactgtgtttgtggatcagagaaggctttatagcacagggggcattcagatgagtcttagaggaagagaagaaacatggcaagcagattacatctgagccgtttgaattgtgtttttctttcttcccatgtttattttctaagatctacctgaacttagagactcaagatatttttttaggaaacctcctacccatgtctgaggtagcaagtgcagcctcacgacagataccaggcaatccagagccacaaaacgtgattcctccaggctctgcctggcctgaccctgtcctgtcagctgggtttacataccagtcccattcttccttttcaatacctacccccaaatcttctcctaaccaccatctgttttttttttttaaagcattttttgctttaaaagcatcctgaccccaatttctttgagctcacgggccttttgctgaaggtctctcagggtgtagtggtgtggctctctggacttaacgtcactctcagaggtcagaaccttggagatcagaactgattctcaccaggtgtgagaggtgtggtagcagattgcaatgctctgcacctcttccttgcaagtgagcaacttcaggctctctgggcagaggctggcccactgtagtttgcagacatgctctccagatggttttactaagtcccctctccctgatagggaatcctgctggaccagcgcagccctggtgtggagaggttaaaagacttgcacaggatcaccaagtcatgctgtagagccaggattcctagacccagggctctgcactctcaaggctggccccatgtgctcaaggggatctaatgtttgggctccaaactaaccatctcggagctgggctcctcatttactgccaaaccctcagcttatgtagctagaaagggccctggagtgagaaagcctggattttcaaattgatgctcccctactgactagctgtgccactctgggcaaatgctcttccttgagcctgtttccacacctgtaaagtggggatgatgatcctatctcactgcttttgtgaggattacaggaaagcacctgtcctggctctgtacctggcacgtagtaggtgctcagttcatgctggtttccttcctgcctttagtagggacctgctctgtgctcacacctcggctgcatgcaccctgctgtgacggaggctagtgtggaagaggtcctgtcctcagggaattaactgtcttattgggagacaacaactgtcctccttggaacacccaagaaaccatgcaaagcagtggacaacacagaacacgccctcctcctcgctgcctgcagctccaatctgattctgcttgggaatgggcggagcacgtgggctgcttaactgctgtataggacaagccccttacccctctctgggcccatgaattcctggcttggtttatgttctgatttgacacactgattttaatcttcgaatcatgacactgagtgcagaggaggtggcattccgacagcaggacatacatgttggtgtgaagactgggacgacactgggtagaatctagtttttaattattattaatataaaggatcaaattaatttaaatatgattctgaagtctacagaacttttagttctgtgctgtctatgtggacactttggtaaaatgcaaattatgatatggacgttatcattggtctggtgagatgtttcatatttgtgacagttaatttaaaaattatgagttaatgctgcctgtgtctatggggttctgtcttctttgatagccatctattcatctggatcatgggaccctctctaatccttccaccaatcaaataagctattgctattggtttggagttgagatatcagtctcggaaacttctgaaaaatgctaataattacccaaggattatgtcaaattttaaaataaatgtgtgtgtgtttctttaa

SEQ ID NO: 14795 - DNA, 8726 bp, Homo sapiens
gacaatgctggggagatgaagatagtgtgtggctgcttctggactcaaggaggaggagagagattccgcgagccgacaccatgcgatccaaggcgagggcgaggaagctagccaaaagtgacggtgacgttgtaaataatatgtatgagcccaaccgggacctgctggccagccacagcgcggaggacgaggccgaggacagtgccatgtcgcccatccccgtggggccaccgtcccccttccccaccagcgaggacttcacccccaaggagggctcgccgtacgaggcccctgtctacattcctgaagacattccgatcccagcagacttcgagctccgagagtcctccatcccaggggctggcctgggggtctgggccaagaggaagatggaagccggggagaggctgggcccctgcgtggtggtgccccgggcggcggcaaaggagacagacttcggatgggagcaaatactgacggacgtggaagtgtcgccccaggaaggctgcatcacaaagatctccgaagacctgggcagtgagaagttctgcgtggatgcaaatcaggcgggggctggcagctggctcaagtacatccgtgtggcgtgctcctgcgatgaccagaacctcaccatgtgtcagatcagtgagcagatttactataaagtcattaaggacattgagccaggtgaggagctgctggtgcacgtgaaggaaggcgtctaccccctgggcacagtgccgcccggcctggacgaggagcccacgttccgctgtgacgagtgtgacgaactcttccagtccaagctggacctgcggcgccataagaagtacacgtgtggctcagtgggggctgcgctctacgagggcctggctgaggagctcaagcccgagggccttggcggtggcagcggccaagcccacgagtgcaaggactgcgagcggatgttccccaacaagtacagcctggagcagcacatggtcatccacacggaggagcgcgagtacaaatgcgaccagtgtcccaaggccttcaactggaagtccaacctcatccgccaccagatgtcccacgacagcggcaaacgcttcgaatgtgaaaactgcgtgaaggtgttcacggaccccagcaaccttcagcggcacatccgctcgcagcacgtgggcgctcgggcccacgcctgccccgactgcgggaagaccttcgccacgtcctccggcctcaagcagcacaagcatatccacagcacggtgaagcctttcatatgtgaggtctgccacaagtcctacacgcagttctccaacctgtgccggcacaagcggatgcacgccgactgccgcacgcagatcaagtgcaaggactgtggccagatgttcagcactacctcctccctcaacaagcaccggcgcttctgcgagggcaagaaccattacacgccgggcggcatctttgccccgggcctgcccttgacccccagccccatgatggacaaggcaaaaccctcccccagcctcaatcacgccagcctgggcttcaacgagtactttccctccaggccgcacccggggagcctgcccttctccacggcgcctcccacgttccccgcactcacccccggcttcccgggcatcttccctccatccttgtacccccggccgcctctgctacctcccacatcgctgctcaagagccccctgaaccacacccaggacgccaagctccccagtcccctggggaacccagccctgcccctggtctccgccgtcagcaacagcagccagggcacgacggcagctgcggggcccgaggagaagttcgagagccgcctggaggactcctgtgtggagaagctgaagaccaggagcagcgacatgtcggacggcagtgactttgaggacgtcaacaccaccacggggaccgacctggacacgaccacggggacgggctcggacctggacagcgacgtggacagcgaccctgacaaggacaagggcaagggcaagtccgccgagggccagcccaagtttgggggcggcttggcgcccccgggggccccgaacagcgtggccgaggtgcctgtcttctattcccagcactcattcttcccgccacccgacgagcagctgctgactgcaacgggcgccgccggggactccatcaaggccatcgcatccattgccgagaagtactttggccccggcttcatggggatgcaggagaagaagctgggctcgctcccctaccactcggcgttccccttccagttcctgcccaacttcccccactccctttaccccttcacggaccgagccctcgcccacaacttgctggtcaaggccgagccaaagtcaccccgggacgccctcaaggtgggcggccccagtgccgagtgcccctttgatctcaccaccaagcccaaagacgtgaagcccatcctgcccatgcccaagggcccctcggcccccgcatccggcgaggagcagccgctggacctgagcatcggcagccgggcccgtgccagccaaaacggcggcgggcgggagccccgcaagaaccacgtctatggggaacgcaagctgggcgccggcgaggggctgccccaggtgtgcccggcgcggatgccccagcagcccccgctccactacgccaagccctcgcccttcttcatggaccccatctacagggtagaaaagcggaaggtcacagaccccgtgggagccctgaaggagaagtacctgcggccgtccccgctgctcttccacccccagatgtcagccatagagaccatgacagagaagctggagagctttgcagccatgaaggcggactcgggcagctccctgcagcccctcccccaccaccccttcaacttccggtccccacccccaacgctctccgaccccatcctcaggaagggcaaggagcgatacacgtgcaggtactgtgggaagatcttccccagatcagccaatctcaccagacacctgaggacgcacactggggagcagccgtacaggtgtaagtactgcgaccgctccttcagcatctcttcgaacctccagcggcacgtccggaacatccacaacaaggagaagcctttcaagtgccacctgtgcaaccgctgcttcgggcagcagaccaacctggaccggcacctcaagaagcacgagcacgagaacgcaccagtgagccagcaccccggggtcctcacgaaccacctggggaccagcgcgtcctctcccacctcagagtcggacaaccacgcacttttagacgagaaagaagactcttatttctcggaaatcagaaactttattgccaatagtgagatgaaccaagcatcaacgcgaacagagaaacgggcggacatgcagatcgtggacggcagtgcccagtgtccaggcctagccagtgagaagcaggaggacgtggaggaggaggacgacgatgacctggaggaggacgatgaggacagcctggccgggaagtcgcaggatgacaccgtgtcccccgcacccgagccccaggccgcctacgaggatgaggaggatgaggagccagccgcctccctggccgtgggctttgaccacacccgaaggtgtgctgaggaccacgaaggcggtctgttagctttggagccgatgccgacttttgggaaggggctggacctccgcagagcagctgaggaagcatttgaagttaaagatgtgcttaattccaccttagattctgaggctttaaaacatacactgtgcaggcaggctaagaaccaggcatatgcaatgatgctgtccctttccgaagacactcctctccacaccccctcccagggttctctggacgcttggttgaaggtcactggagccacgtcggagtctggagcatttcaccccatcaaccacctctgacgggctgggcagccgggggccggtggccagagcgagggcaccagccacgaaggacggaggcgggcggggccccggagaaccctgtccctgcgtgtggccactcctcagcatcctccccacccaccatggttcattccgacttttccaatggaaactcagatcccaaaagtccctaaagcagtcgtagagtctcaccatctccaaggattggtcttgagaacactgttcagtgacggccatgcaggtggccgtccaaagacagccaacggagctgcctcgcagaatcagccagtgggcaggtggacgctctgctgagacagaagctggtggccactgccgggtgcccgcgtggggtcgcggaagggaatggatagactggtgtgctcaaaagagagagatcactcaaatgatttttataatgaaatgacaagaataacccttttggtaaccgtattgactgcagagtctatttaagcatgtggttttaaaaatagacagtattttttaaaaatcaaaaaatgacttgcaaattgttttttaaaagtaattttgcattgctttgaaatttgagctcatttgcaaacccgagtctgcctgggaacccgcactgtgcctgggtgtattctttatactgtagataatggagaaattttctatctctgtccctatttgtataagccaaggtgatgctgggtgccccgaggcagaacaagaggcgcggggccacacccgtgaaccatgcagacggccgaagaagtcttaggcagggcgccctgggctgcaggcctgcccgaggctgggatgggaagtgtgcctgccctcgtgtgacatggaattggtgtcaggaccgccacgtggccttcagaggaatccacaggtccccacccaagatccctcaattatatggggaagtcgagggcctgtggcttggatccgccatgcagagatgtggccgggcacccatcttccttccctcctctgtccctgcctcggccaccccacgcgggaacccagcgccgtcctctgaaggcagggccttggccacgtcctgggtctcccacctcccacctgaccccagcggctccggtgtcctccacgtggctgccctggggagcaatcccagcggatcgctccgggccaccaagccgcacctgtgcctgagactccggatggacgacacagtcgtcacgtcgctcttcctgcgggttcttggcgagacacagcttgagaacagaagggcgtcgggggaacctgccgcaaggagcagagacagcacagccccccgggcccagccgcctccctctcttgggacgcaacttcttccccactcggatgggctttaaattattcccataggggccaatttcaaataataatttttttccctgatggaatttaccttaatctgtatataacttgtaattttttctaattcatttcttttcttattttatttcctccttaacagtatttttggcattagacattcttattgtgaagaaataatgttaatataagtatctggtgaaggaccaaaaccgtgtgataaggttgtgtgtcgtgtgggagtggggcgattttttatgtgccaaatacccccgtcccccccatgaatcctgctgtccctgctgccgtttaccagacaatcatatgtttttgttaaatttgcgtttcagttacatttgcatttaagacaagtgttctatttatttcttgtattgtttggaagaaaaaatgatgatagagtcccaaaaagaagagaaaaaaaatgcccaagttgccctttaaaaaaaaagagcgtaaatacaaacaggagtggtgcaagccgccttggtgtgggtttgtgtcacgtgtggacatctcctcaggctttgtgtcacgcgtggacatctcctcaggctgtccccagcggtgacgggaggtgtcctggctgctccaggacaaaagacaatcgtctctgtgggtgccgggtggtccaggcttgcactgaagacgtgccacggggaggctcctgcaggaggctcaacccgacggatcacagtgaaagggattcctcccacgccagatctgcacaacgaggcaagacaggacccacctgtgcgtgcgctggggccatggggtggccccgccggggcagcgggggagctgcctgcagaagagccagctggcgtgtcgggaaggatccaggatctgcaaacacaactgctcaggccttctcacgcgtttccacaacatcccctgggtcagacccaccaggtaccccgtaggaatttccagtttcccttgatctagatgggattcttataaaaattcaacctcagacataaacaccccatttctgtaaacccaaattatatggtttcttctgcgaaagagtaaggtgtgtgcttttttttttttgcaatatgaccccgtctctctgaagtgggacattcggacggatggagccctcagcgtgtcttttcagcaggagcagaaccgatgagagccgcccttaccgttggtctccggatcccccagtcccatcccgccgttttcggctgtcttcctaaccgtcctgtcttctcttggcgctctttccttccacctttcccaagagtcctggttgcacgttttaagtcatatattttcgtccccctgaaaatgatggcaagcccagtttctcctgagcattcagacccccaggccccagcacttggcgttttcaggaggccctgttcttagagcccctgacaaaggcagcacttatttcctgggctggtgcgccccaaaacacggccccgacacttagtgtggccccaggccccagcgagcctcgccctcccagttttgctctgcccagcagtgttggtgcccagagatgacaagggccagggagcctggcccgggtgtgagaattcagagattctggcctccagctgtcaccacaccgtaacggggccatgtaactgtgcagcatggacagggatgcgacggggcagctggctgtgtccatggccaggtggccagggtcagggctgcaagccaggggtccagggcccttccgttcagcccaaatgctgccccaatgctaactccttggattgtcaacccccatcccccaaatggaaattccgaaggaggcctcctcgcacctgccctccgctgctcctcagaccccagcccccagcgagccgacgtccccacccgttcctgctctcatccccaggttgggcacgtggggttcctcctctgtgggcctggcagacccttcatgagtgggacccaagatatcactgacttcaacccagaggatcgagcccctgcaccctgcctggggccctggggtgtggagcagtggctggggtgggcgtggtgtggcctgagagactgcccagctggagaggccttcctttacaaggccacgcgtgcagctgtcccatccagaccccgactggccaagacctccacgtccccagagtccagccctggaaattccaagggccctggcgtcctctgccttccccgcttccccatgagcgtctgcaaaacacttgcctgaatacatatcacgtattttagactcgaagcctcaaagcactggattgtggtcccctgccccctctgtcccgtccccctgcccaagtgactgaaacctactgagctatattcactgtgctgtcctagggggagggagagcagagctcgcccctgcactgcagccttgtgggggagggcaaggctctcctcccagccagggacgccaggacatagctgctcctggtcagtggaggtcagccgggtatcaaaagccatgaaactgtgtctctgtagcaatgagtgatactgtgacaaaaccatccttgcattcttcctagaagagttcctctgctccttccattccatttttgtgtttgttttgttcttttctgtcactgatccgtattaccacttttggaaaaaaataaataaataaataaataaaaggcagcttgagtttccaaacgtgtgattcacttgtgaacaaaagtcattctaacaattgccttcagcgtcacgtgcattgccactgcgctttcggcacgagggatgctgagccctggtgtcagagtcgtaatttaaagcgtgtgtgtatatggactttgtcccttaaggtcgatataaagaatcctcgcagaatcacagacctgtgccgcccgccaccttctgccattgttacattacagatttggtttagttttgttttgttttgttttttcttttagaactgtatagtattgaaaaagaaatcaaatgtaaatgtctggttttcatataatgtttaaaaagaccattgagaaggaggctggcgctcgccccatgtcccccttgattgtaaattgcttctgttctgtttataagtaaactgtgcatgactcctgcttagcggtcattatcgtgtctgttggtgaaatttttattaaaaggaaaattctgtagatgcacttattgaatatgtgattaggatctacgtctgagactaggagtcctgaactgctgacgcgaaagaggcgcagttcccaattaatacggaaatcgctgtgggagaagaatgaaataagacgtgaagtgtaggaaatcatgaaaagaacaattttgcaaattgcattctgatgcttgtgatgaacacaaatgtacttgtgtagagacatttccttaagagaaagcctaggagaagccgatttggaggttaatgctgtagaataggactgtataccaaatgtaatctttccaatgctccaatgaatttatacatgagattgatatgcaataaatctgtgtgcttttctaaaaaaaaaa

SEQ ID NO: 14796 - DNA, 3012 bp, Homo sapiens
gctttggccagagtggtttgatggttttgtgttagtcttcctgcagctgagcttccacaagacactttttccctttcagccacccaatatctcgcgagacttgctattctgcgccccctcctaccttgcgcttgcgcagatcttcaaagcagaaggtcgcgcttggaggaagtggcggctttgagtccggtggcccaatcgctgttactacttctctgaagctcctctcggctgcttgccgagacaccctgccgccaagatgcctcgaattatgatcaaggggggcgtatggaggaataccgaggatgaaattctgaaagcagcggtaatgaaatatgggaaaaatcagtggtctaggattgcctcattgctgcatagaaaatcagcaaagcagtgcaaagccagatggtatgaatggctggatccaagcattaagaagacagaatggtccagagaagaagaggaaaaactcttgcacttggccaagttgatgccaactcagtggaggaccattgctccaatcattggaagaacagcggcccagtgcttagaacactatgaatttcttctggataaagctgcccaaagagacaatgaagaggaaacaacagatgatccacgaaaacttaaacctggagaaatagatccaaatccagaaacaaaaccagcgcggcctgatccaattgatatggatgaggatgaacttgagatgctttctgaagccagagcccgcttggctaatactcagggaaagaaggccaagaggaaagcaagagagaaacaattggaagaagcaagacgtcttgctgccctccaaaaaagaagagaacttcgagcagctggcatagaaattcagaagaaaagaaaaaggaagagaggagttgattataatgccgaaatcccatttgaaaaaaagcctgcccttggtttttatgatacttctgaggaaaactaccaagctcttgacgcagatttcaggaaattaagacaacaggatcttgatggggagctaagatctgaaaaagaaggaagagatagaaaaaaagacaaacagcatttgaaaaggaaaaaagaatctgatttaccatcagctattcttcaaactagtggtgtttctgaatttactaaaaagagaagcaaactagtacttcctgcccctcagatttcagatgcagaactccaggaagttgtaaaagtaggccaagcgagtgaaattgcacgtcaaactgccgaggaatctggcataacaaattctgcttccagtacacttttgtctgagtacaatgtcaccaacaacagcgttgctcttagaacaccacgaacaccagcttcccaggacagaattctgcaggaagcccagaacctcatggccctcaccaatgtggacaccccattgaaaggtggacttaataccccattgcatgagagtgacttctcaggtgtaactccacagcgacaagttgtacagactccaaacacagttctctctactccattcaggactccttctaatggagctgaagggctgactccccggagtggaacaactcccaaaccagttattaactctactccgggtagaactcctcttcgagacaagttaaacattaatcccgaggatggaatggcagactatagtgatccctcttacgtgaagcagatggaaagagaatcccgagaacatctccgtttagggttgttgggccttcctgcccctaagaatgattttgaaattgttctaccagaaaatgccgagaaggagctggaagaacgtgaaatagatgatacttacattgaagatgctgctgatgtggatgctcgaaagcaggccatacgagatgcagagcgtgtaaaggaaatgaaacgaatgcataaagctgtccagaaagatctgccaagaccatcagaagtaaatgaaactattctaagacccttaaatgtagaaccgcctttaacagatttacagaaaagtgaagaactaatcaaaaaagaaatgatcacaatgcttcattatgaccttctacatcacccttatgaaccatctggaaataaaaaaggcaaaactgtagggtttggtaccaataattcagagcacattacctatctggaacataatccttatgaaaagttctccaaagaagagctgaaaaaggcccaggatgttttggtgcaggagatggaagtggttaaacaaggaatgagccatggagagctctcaagtgaagcttataaccaggtgtgggaagaatgctacagtcaagttttatatcttcctgggcagagccgctacacacgggccaatctggctagtaaaaaggacagaattgaatcacttgaaaagaggctcgagataaacaggggtcacatgacgacagaagccaagagggctgcaaagatggaaaagaagatgaaaattttgcttgggggttaccagtctcgtgctatggggctcatgaaacagttgaatgacttatgggaccaaattgaacaggctcacttggagttacgcacttttgaagaactcaagaaacatgaagattctgctattccccggaggctagagtgtctaaaagaagacgttcagcgacaacaagaaagagaaaaggaacttcaacatagatatgctgatttgctgctggagaaagagactttaaagtcaaaattctgaagtacagtttatattctgtcacaggattaattaattgccggttttcatactctagaaggctgaaactgatgtttatcttcattgacaaatttacccaccatctgtggtttttcagttgtttattttaaatgatatcgatcttacacattctgtgtataaagaccttaactccacaggacggacattttagagtttaaattattaaggctatcattcttttagtaatgtcatatttgcaaacttttttagttttggcctttaatttaaaaagcctaattttaaagtgctgcctttgagtaactcttgaataaaaacaaaatataaaaaattgaaaaaaaaaaaaa

SEQ ID NO: 14797 - DNA, 5006 bp, Homo sapiens
caaggaggagacggagctgaggttccggcagctgaccatggagtaccaggccctgcagcgtgcctacgctttgttgcaggagcaggttggagggacgctggacgcagagcgagaagttaagacccgtgagcagctacaagccgaagtgcagagggcacaggcgcggatagaggacctggagaaggccctggcggagcaggggcaggatatgaagtggattgaagagaagcaggcactgtaccggagaaatcaagagcttgtggaaaagatcaaacaaatggagacggaagaggctcggctcagacacgaggtgcaggacgccagagaccaaaacgagctgctggagttcaggatcctggagcttgaggagagggagaggaagtcacccgccatcagcttccaccacacgcccttcgtggacgggaagagccccctccaggtgtactgcgaggccgaaggtgtgacggacattgtggttgcggagctgatgaagaagctggacatcctgggcgataacgccaacctgaccaatgaggagcaggtggttgtcatacaagccaggacagtcctgaccttggccgaaaagtggctccagcagattgaggagacagaggcggcgctgcagcggaagatggtggatctggagagcgagaaggagctgttcagtaagcagaagggctacctggacgaggagctggactaccggaaacaggccttggaccaggccaacaagcacatcctggagctggaagccatgctgtatgatgccctgcagcaggaggccggggctaaggtggctgagctgctgtcagaggaggagcgcgagaagctcaaggtggccgtggagcagtggaagcgccaggtcatgagtgagctgcgcgagcgggacgcccagatcctgcgggagcgcatggagctgctgcagctggctcagcagagaattaaagagttagaagaaagaatagaagctcagaagagacaaataaaggaactggaggaaaagtttctatttttgttcttatttttctccttagctttcattctctggtcatagtccgtcttggcaccctgacgtgccccacattgaatcggacccttttcctccagtgggaccagaaagcagggacaaaatgggacgtcgcgtctccatcctgaagacccagggagatttggtctctgcacgcccgtcccgtggaggaagagtgagaaggggcagtgtgtggggcgtggagctgccgtccacgtgggatgtgccagaactagaactggctctgccgacttctcgggggcttctccgggacaggcctggccttggctgctggaccctgggtcccttctcccggacggcagcccccatcccatttccagggatgtgtagcattccctgccaagcaggggtgagaactgcttctgtgcagaagcaccagccgcgggtcccctcctctctcttggttctcacagtagctgccactggtgtctggaggaagattttcagaaacaacagaggcttggcctgatgacaagatgaaagctggacggtgaccttcattcaggggaacctggaggctccctgggatggtcctgggagggctccccgacgcctcaggggcccctccgatgctgcaatatgttgctggggtcctgagcacccgctggccaacagaccccacatccaccctcgttcatcatcatctctgtggggacagacaagagccgtggccgccgcgggccgcgtggtgccatcaaccctctgcctccctactcaacctgagacaggaaggccaagatcccgcccaagccgccagctgggagcaccgcgggactgagccaaggaaggcgtggggagcgtggtgacaggaggtgggacgagggggcggagctggctggaacacggatgccagaggctgcctccatagtgaatctccagaagtcacagaggccctgggcacccagagccacccagcctggaagcccctgcacgggccagccctgcaggccatggaccccggcgggcaccgaagcctcaccccaagcctttgcacacaaggagcagcccaggtggggatggcgggcgcaagaagggaaccgcggggacggcctttcccctcccgccctgtgtggggacgctgcacgagccgtggaccaagaggctgacaggaggggtccgcagcgaggaggaggtgcgaagggggcggcggctccgtcttgcaggtcccctggggcgtgttcttcaggtgcgtggtggacgaggcggcgtcctcgcggggtcgggacctgggtacccagcagcatctggctcctgcatccaccaagggcgcccaggcacagcctcaggccagaaggttcgctgcagaggttcattctagaaggagcgggagaccagcagtcccagccctgtccaaggacgcccgctgcttggcacacgagggcgccgcaggcccaccatccctcaggacatggctgccgagtccccagagacttctggtcccacagcaagagctggagctccaagcataacatctctaactgtgcggcaaggacagcgcagccagagagaggaagcagtgcattggtgaaggcaacgttaggtgtgatttccattcctgctgggagacccgggacgcagcccgggagcttcgtccagcctgtggatggagcctgactggctgcagatggaacttctgtgtcctcccaccctaggtgggctaaggttctgctctcagagctgaattgacaggaggtgtgtgtgtgtgctcacttgtgtgcacaagcatgcgtttatgcatgttttcacgcaaccagaagagccattcgtgggatttagccatttcgaggcacctagaagttgaggcagccagctgtgcagccaggtgtgactgttactggcagcattgtataaaagacacgactcagctgccgtagggaggactgggttgtctggaagtattaggctcattttatatttgtgtcagaagaaatgtctgactttggggcagatgacacggtggctgcggaccaggcatggctccctaggttgaaatcagggaaaagctaatagtatcagacagatatgctttttctttggtggctgcaggatttttgctggaaaatgcactattaatcagcacttgtccaagaaagacccatccatttctgttgtcattcaagccacagttcctgatttactcggcaagatactgggccagttcagtgtctctagctgagcctgacctcggggtttgcgtctcgagtctgaaatcctgtttagtcctctgtgcatagttttgtctcattttaacgactgcatcttcttggcacatttattatactcacaactgaatggcacacaatagccttgtgttaataaaagctaccgtggcgctgtgggtgaaccgctgggttgaagtccgatggactctacgatgcaggcatccagaaatatgttgtaactctacctggctccctgccagcctggcctcctcctctgggagagctcctggcatggtcccaatgtgtacctgcatgggaacaacagctgcatgggccagctgtttcggatctaaagatgtgcagtgaaactcacattcccagattcacatccctcatgtttatttgggtcatcatggtttagcatgttgtatatatgtctggagcacttcatacacctctatccaccacagacactcttaatcacagttctgtaataataataaggcaaactatacggcaaagagaagcatgtaaatatgtaccaaatccttatgaagttgtaattgtttatatgtaaaaagtatgtatataggaacgggagaaggtgcaaggaatgtgctgaataacatccaaactgcatcgcgtctctgccccattcctgaaagcacacatctagttggagcgtcagttcctctccttagatatcattgttttcactcgtctatcataggcaccttctttacatctgattacaatacccagcatttcagaactgggtttttgcccccaaaaaggtaaatatgagcatttatcactgactcctcctggtccagtgagcagcagcagaattcaagtatttaaaaataaggtgcatttctaaattgcaggctataccttcttttccaaaccaatgggctagagtgaatttcctccaagtacttgggctgtcttactgctagctcttctaacaggggaagtctgtatgaatgcatcaccccctaataaggcaagaggaaggaccctgaaatgttgccagaaatgtactgttacatcaacatttacattatattaacatcatcacactctgtgttcaacacacagaacaacatagatactttagtttgtctaaagtaaaaatccacataaatagcagattcctttgttgacaccagtgtgttgtttaccttgtgcccatggtccagattttgagctggagaaggactatggctgttccttaaagtctctgcccttgcagaatctgtagccttcaggataccccgagtgccttacagggcttgtgaacaccgatactagaagtcaaaaagaagagagtgcccaagtgtgggtttggaggcactgacgcattcgccaactcaccgtcatcccctccttgaaaccctgagagagagtgtgtgttttatcacagtaatggaattcagtttagcctcaggaaactcatattgtgaatataggtatcaaatcatatatttgtttactgtatattttttaaaaagctttattgtaaatttatgcaaaaactaaccgggcctgttttcttacggcggcatgccaggtagtgtgtgtattctcccaggcactcccttcatagtcaccctctaaccacatgacattccgttccatgctaagcagtattcacaggcctaaaataggtttgtatggtgatctacaagattttacaaatatttttgtattgtgattcctatgatatataccagagaattttttactcgtttgtaaattattgtacagttttaataaaaaatgttttaaatctt

SEQ ID NO: 14798 - DNA, 3966 bp, Homo sapiens
gggcggcgccgccgcgcccgacgcctctgggggtggggacttcgcgggagtcgccggcggaggcgaggaggagctctgcgcggcgcggcgggcgatccgagccgggacgggctgcaggcgggggtgctgcagaggacacgaggcggcgggctggagacatggaccgcggcgagcaaggtctgctgagaacagacccagtccctgaggaaggagaagatgttgctgccacgatcagtgccacagagaccctctcggaagaggagcaggaagagctaagaagagaacttgcaaaggtagaagaagaaatccagactctgtctcaagtgttagcagcaaaagagaagcatctagcagagatcaagcggaaacttggaatcaattctctacaggaactaaaacagaacattgccaaagggtggcaagacgtgacagcaacatctgcttacaagaagacatctgaaaccttatcccaggctggacagaaggcctcagctgctttttcgtctgttggctcagtcatcaccaaaaagctggaagatgtaaaaaactccccaacttttaaatcatttgaagaaaaggtcgaaaacttaaagtctaaagtagggggaaccaagcctgctggtggtgattttggagaagtcttgaattcggctgcaaatgctagtgccaccaccacggagcctcttccagaaaagacacaggagagcctgtgagattcctacctttgttctgctacccactgccagatgctgcaagcgaggtccaagcacatcttgtcaacatgcattgccatgaatttctaccagatgtgcttttatttagctttacatattcctttgaccaaatagtttgtgggttaaacaaaatgaaaatatcttcacctctattcttgggaaacaccctttagtgtacatttatgttcctttatttaggaaacaccattataaaaacacttatagtaaatggggacattcactataatgatctaagaagctacagattgtcatagttgttttcctgctttacaaaattgctccagatctggaatgccagtttgacctttgtcttctataatatttcctttttttcccctctttgaatctctgtatatttgattcttaactaaaattgttctcttaaatattctgaatcctggtaattaaaagtttgggtgtattttctttacctccaaggaaagaactactagctacaaaaaatattttggaataagcattgttttggtataaggtacatattttggttgaagacaccagactgaagtaaacagctgtgcatccaatttattatagttttgtaagtaacaatatgtaatcaaacttctaggtgacttgagagtggaacctcctatatcattatttagcaccgtttgtgacagtaaccatttcagtgtattgtttattataccacttatatcaacttatttttcaccaggttaaaattttaatttctacaaaataacattctgaatcaagcacactgtatgttcagtaggttgaactatgaacactgtcatcaatgttcagttcaaaagcctgaaagtttagatctagaagctggtaaaaatgacaatatcaatcacattaggggaaccattgttgtcttcacttaatccatttagcactatttaaaataagcacaccaagttatatgactaatataacttgaaaattttttatactgaggggttggtgataactcttgaggatgtaatgcattaataaaaatcaactcatcattttctacttgttttcaatgtgttggaaactgtaaaatgatactgtagaacctgtctcctactttgaaaactgaatgtcagggctgagtgaatcaaagtgtctagacatatttgcatagaggccaaggtattctattctaataactgcttactcaacactaccaccttttccttatactgtatatgattatggcctacaatgttgtatttgttatttattaaattgtgattgttttattattgtttatgccaaatgttaactgccaagcttggagtgacctaaagcattttttaaaagcatggctagatttacttcagtataaattatcttatgaaaaccaaattttaaaagccacaggtgttgattgttataaaataacatgctgccattcttgattgctagagtttttgttagtactttggatgcaattaaaactatgtgctatcacatgtgaaaagcttaataaattccatctatcagtagtataggtctcaatatttattatgagaccagtggtctggaaacagcttgttgtaccgaatcaactggagtctatgcttaaaaaaaaaaaatttttttttaaccatccttaaattattgcttaatggtatcatattaacatattctaaataagggctttaaggcacaggctgttgaagcattttctcagaggagtggatctgtagaagtctgtctttctatagaaatattgtgcttactcaagtgttaaattattttttctatgaactagtctacttcttaaaattcaaacatattcttttgatcacattgtttcttgagcatcctgccctgctactaacttttcaacaaggcaaaatggagtaaagtggcaatttctttagatgagtgaaataccctcaagtctcttttctgcccaaaaagggaaaagtgatagaaatgggggtggcaagtggggtgagtggatgaaggtgggtattgggggtggctgtgaaagaaaataatggagaatcacttttctagacatctacctatacttaatctaagaaacaaagtaatctactgtaaagtactctgccccttgaaagaagtattaaaaagagtgaggatggatttagaaaaaaacatgaatttagaaatattcaaaatggtttttgtggcagattcaatattatgaattcacagatatttaaagaatgagaaacatagtaattagtagaaatgccagaaacagttcctggttcctcttgtgtttgacactaagaaaatagcaagagtgtgaaatctcagatacttatgaaatctcacagatgtaaggactcaagtgtagaagaaaatatccccttcttacaaaaagaaatgtcaatttatggagtttgtgggaaatagggcaagaattcttatgcttatgagagccaagtagtcagtggaagagagtagagctcaaaactggattatcaccttagcaacttagaatagtttgaaatagaaaaaaagtatttaatttggatctggatctgttaagatatgcacagtctattttttgtatagtattggaaaataaaaatgctataatttgggtatgggttcttttgtatacattacctgcccattgaggaaaggggcaagtccattatgcaacttctctccaaacccttcatattctggatatgatacttaaagagccatgagcagctacattctgcctatcagaaggcatttattaaatgactgcttgctgaagatgtgtccaaagagatcctacattaaggtcatttgtcagaatgatgtttgtgtttgtttagagttggctgacctccaactcctggggtcaaggaatcctactgccttagcttcccaaatagctaggactataggcatgcacccggccatgtgttttatttatagctcttaaagcccagatgaagaaatcacatttttgcccatagtgaagaaacatttggccattgattagtccttattttcagtgactgtcctgttttcattagattagagagaccctgtgtgggccacagttaatataaaccattatcacttttaagtaaacctgcacatcttagatttcataatttccttattgttctgactcaaaatgaactaagagcttttcactttttgtttgtaagttctcagagagtcgggtctgcaagtgcttttgcctgccaggattttgtactcaaataaatgctatttggcaactaaaaaaaaa

SEQ ID NO: 14799 - DNA, 7717 bp, Homo sapiens
gccgcgcaagcgcccttggcgcacagttcacctgctgccgttgtcgtcgccgccgcggctcccggggctggatggggggccgaggccagccagtggcacccggaagaaagagacgcggcggcggcgacgccgacaccctcaggacgagtgtccggacttgcccacagcctcaaggaggagacggcgaggcccggcccccgctgtccctggtgtaaagaagtcgccgtagccgtcgcggccgggactccccgggctctcgcccttcaggtttcgttgacactcaggaccgtacgtacgctgcgccatgttcaagaaactgaagcaaaagatcagcgaggagcagcagcagctccagcaggcgctggctcctgctcaggcgtcctccaattcttcaacaccaacaagaatgaggagcaggacatcttcatttacagagcaacttgatgaaggtacacccaatagagagtcaggtgacacacagtcttttgcacagaagctccagctccgggtgccctccgtggagtctttgtttcgaagtccgataaaggaatctctattccggtcttcttctaaagagtctttggtacgaacatcttccagagaatccctgaatcgacttgacctggacagttctactgccagttttgatccaccctctgatatggatagcgaggctgaagacttggtagggaattcagacagtctcaacaaagaacagttgattcagcggttgcgaagaatggaacgaagcttaagtagctacaggggaaaatattctgagcttgttacagcttatcagatgcttcagagagagaagaaaaagctacaaggtatattaagtcagagtcaggataaatcacttcggagaatagcagaattaagagaggagctccaaatggaccagcaggcaaagaaacatctgcaagaggagtttgatgcatctttagaggagaaagatcagtatatcagtgttctccaaactcaggtttctctactgaaacaacgattacgaaatggcccgatgaatgttgatgtactgaaaccacttcctcagctggaaccacaggctgaagtcttcactaaagaagagaatccagaaagtgatggagagccagtagtggaagatggaacttctgtaaaaacactggaaacactccagcaaagagtgaagcgtcaagagaacctacttaagcgttgtaaggaaacaattcagtcacataaggaacaatgtacactattaactagtgaaaaagaagctctgcaagaacaactggatgaaagacttcaagaactagaaaagataaaggaccttcatatggccgagaagactaaacttatcactcagttgcgtgatgcaaagaacttaattgaacagcttgaacaagataagggaatggtaatcgcagagacaaaacgtcagatgcatgaaaccctggaaatgaaagaagaagaaattgctcaactccgtagtcgcatcaaacagatgactacccagggagaggaattacgggaacagaaagaaaagtccgaaagagctgcttttgaggaacttgaaaaagctttgagtacagcccaaaaaacagaggaagcacggagaaaactgaaggcagaaatggatgaacaaataaaaactatcgaaaaaacaagtgaggaggaacgcatcagtcttcaacaggaattaagtcgggtgaaacaggaggttgttgatgtaatgaaaaaatcctcagaagaacaaattgctaagctacagaagcttcatgaaaaggagctggccagaaaagagcaggaactgaccaagaagcttcagacccgagaaagggaatttcaggaacaaatgaaagtagctcttgaaaagagtcaatcagaatatttgaagatcagccaagaaaaagaacagcaagaatctttggccctagaagagttagagttgcagaaaaaagcaatcctcacagaaagtgaaaataaacttcgggaccttcagcaagaagcagagacttacagaactagaattcttgaattggaaagttctttggaaaaaagcttacaagaaaacaaaaatcagtcaaaagatttggctgttcatctggaagctgaaaaaaataagcacaataaggagattacagtcatggttgaaaaacacaagacagaattggaaagccttaagcatcagcaggatgccctttggactgaaaaactccaagtcttaaagcaacaatatcagactgaaatggaaaaacttagggaaaagtgtgaacaagaaaaagaaacattgttgaaagacaaagagattatcttccaggcccacatagaagaaatgaatgaaaagactttagaaaagcttgatgtgaagcaaacagaactagaatcattatcttctgaactgtcagaagtattaaaagcccgtcacaaactagaagaggaactttctgttctgaaagatcaaacagataaaatgaagcaggaattagaggccaagatggatgaacagaaaaatcatcaccagcagcaagttgacagtatcattaaagaacacgaggtatctatccagaggactgagaaggcattaaaagatcaaattaatcaacttgagcttctcttgaaggaaagggacaagcatttgaaagagcatcaggctcatgtagaaaatttagaggcagatattaaaaggtctgaaggggaactccagcaggcatctgctaagctggacgtttttcagtcttaccagagtgccacacatgagcagacaaaagcatatgaggaacagttggcccaattgcagcagaagttgttggatttggaaacagaaagaattcttcttaccaaacaggttgctgaagttgaagcacaaaagaaagatgtttgtactgagttagatgctcacaaaatccaggtgcaggacttaatgcagcaacttgaaaaacaaaatagtgaaatggagcaaaaagtaaaatctttaacccaagtctatgagtccaaacttgaagatggtaacaaagaacaggaacagacaaagcaaatcttggtggaaaaggaaaatatgattttacaaatgagagaaggacagaagaaagaaattgagatactcacacagaaattgtcagccaaggaggacagtattcatattttgaatgaggaatatgaaaccaaatttaaaaaccaagaaaaaaagatggaaaaagttaagcagaaagcaaaggagatgcaagaaacgttaaagaaaaaattactggatcaggaagccaaacttaagaaagagcttgaaaatactgctctagagcttagtcagaaagaaaaacagtttaatgccaaaatgctggaaatggcacaggctaactcagctggaatcagtgatgcagtgtcaagactggaaacaaaccaaaaagaacaaatagaaagtcttactgaggttcatcgacgagaactcaatgatgtcatatcaatctgggaaaagaaacttaatcagcaagctgaagaacttcaggaaatacatgaaatccaattacaggaaaaagaacaagaggtagcagaactgaaacaaaagatcctcctatttgggtgtgaaaaagaagagatgaacaaggaaataacatggctgaaggaagaaggtgttaagcaggatacaacattaaatgaattacaggaacagttaaagcagaagtctgcccatgtgaattctcttgcacaagatgaaactaaactgaaagctcatcttgaaaagctagaggttgacttgaataagtctctgaaggaaaatacttttcttcaagagcagctagttgaactgaagatgctggcagaagaagataagcggaaggtttctgagttgactagcaagttgaaaaccacagatgaagaattccagagtttgaaatcttcacatgaaaaaagtaacaaaagcctagaggacaagagcttggaatttaaaaaactgtctgaggaactagcgattcagctagatatttgctgtaagaaaaccgaagccttattagaagctaaaacaaatgagctaatcaacattagtagtagtaaaactaatgccattctttctaggatttctcattgtcagcaccgtacaactaaagttaaggaggcactgttaattaaaacttgcacagtttctgaattagaagcacaacttagacagttgacagaggagcaaaatacactaaatatttcttttcaacaggctactcatcagttagaagaaaaagaaaatcaaattaagagcatgaaggctgatattgaaagtcttgtaacagaaaaagaagccttacagaaggaaggaggcaatcagcaacaggctgcttctgaaaaggagtcttgtataacacagttgaagaaagagttatctgaaaacatcaatgctgtcacattgatgaaagaagagcttaaagaaaaaaaagttgagattagcagtcttagtaaacaactaactgatttgaatgttcagcttcaaaatagcatcagcctatccgaaaaagaagcagccatttcatcactaagaaagcagtatgatgaagaaaaatgtgaattgctggatcaggtgcaagatttatcttttaaagttgacactctgagtaaagagaaaatttctgctcttgagcaggtagatgactggtccaataaattctcagaatggaagaagaaagcacagtcaagatttacacagcatcaaaacactgttaaagaattgcagatccagcttgagttaaaatcaaaggaagcttatgaaaaggatgagcagataaatttattgaaggaagagcttgatcagcaaaataaaagatttgattgtttaaagggtgaaatggaagacgacaagagcaagatggagaaaaaggagtctaatttagaaacagagttaaagtctcaaacagcaagaattatggaattagaggaccatattacccagaaaactattgaaatagagtccttaaatgaagttcttaaaaattacaatcaacaaaaggatattgaacacaaagaattggttcagaaacttcaacattttcaagagttaggagaagaaaaggacaacagggttaaagaagctgaagaaaaaatcttaacacttgaaaaccaagtttattccatgaaagctgaacttgaaactaagaagaaagaattagaacatgtgaatttaagtgtgaaaagcaaagaggaggagttaaaggcattggaagataggcttgagtcagaaagtgctgcaaaattagcagagttgaagagaaaagctgaacaaaaaattgctgccattaagaagcagttgttatctcaaatggaagagaaagaagaacagtataaaaaaggtacagaaagccatttgagtgagctaaatacaaaattgcaggaaagagaaagggaagttcacatcttggaagaaaaacttaagtcagtggaaagttcacagtcagaaacattaattgtacccagatcagcaaaaaatgtggcagcatatactgaacaagaagaagcagattcccaaggctgtgtgcagaagacatatgaagaaaaaatcagtgttttacaaagaaacttaactgaaaaagaaaagctattgcagagggtagggcaggaaaaagaagagacagtttcttctcattttgaaatgcgatgccaataccaggagcgcttaataaagctagaacatgctgaggcaaagcaacatgaagatcaaagtatgataggtcatcttcaagaggagcttgaagaaaaaaacaagaaatattccttgatagtagcccagcatgtggaaaaagaaggaggtaaaaataacatacaggcaaagcaaaacttggaaaatgtgtttgacgacgtccagaaaaccctccaggagaaggaactaacctgtcagattttggagcaaaagataaaagagctggattcctgcttagtaagacagaaagaagtacatagagttgaaatggaagagttgacctcaaaatatgaaaaattacaggctttacaacagatggatggaagaaataaacccacagaacttttggaagaaaacactgaagaaaagtccaaatcacatttggtccaacccaaattgcttagtaacatggaagcccagcacaatgatctggagtttaaattagccggggcagaacgggagaaacagaaactgggcaaggagattgttagattgcagaaagaccttcgaatgttgagaaaggagcatcagcaagaattggaaatactaaagaaagaatatgatcaagaaagggaagagaaaatcaaacaggagcaggaagatcttgaactgaagcacaattccacattaaaacagctgatgagggagtttaatacacagctggcacaaaaggaacaagagctggaaatgaccataaaagaaactatcaataaggcccaggaggtggaggctgaacttttagaaagccatcaagaagagacaaatcagttacttaaaaaaattgctgagaaagatgatgatctaaaacgaacagccaaaagatatgaagaaatccttgatgctcgtgaagaagaaatgactgcaaaagtaagggacctgcagactcaacttgaggagctgcagaagaaataccagcaaaagctagagcaggaggagaaccctggcaatgataatgtaacaattatggagctacagacacagctagcacagaagacgactttaatcagtgattcgaaattgaaagagcaagagttcagagaacagattcacaatttagaagaccgtttgaagaaatatgaaaagaatgtatatgcaacaactgtggggacaccttacaaaggtggcaatttgtaccatacggatgtctcactctttggagaacctaccgaatttgagtatttgcgaaaagtgctttttgagtatatgatgggtcgtgagactaagaccatggcaaaagttataaccaccgtactgaagttccctgatgatcagactcagaaaattttggaaagagaagatgctcggctgatgtttacttcacctcgcagtggtatcttctgagtaaaccatcagtctgtgcttagttaacatgtgtcatggctccgatcttcatcttgaagaagagtgacattgggtgactgctgcttggaaaactgtccacacttgctactctttgagaatgaagttgtcattcagggcccctcatgtagccaaaagaccaagaaaaatctggcccacagataagttgcagactgcctttaaaatagattttatcagtggagaaatggtgatagttttttcttcagttttctcttgggaagagttttatgttgtttaaaagatattttgataacttaacctgctttatgggcttacataatattcctttcatccattctttttaaagaacggcttacctttcctatttatttttagggtgattttttaaaaagacttgtgcaatacattttgaggtgaaacttagtggattttttctgataaattagagcatttaattgactattttattcaggttgatctgttgaatatttgctaaagaccagttctttaagctaagacatgtaaaaaatcccaaatggcagtacctcattgtttacttagcttttgtacttatatttttcagaggaaaaaacactactgtaaattgtgaatagccaatacataactgtattgtatgcaaatctgtgattgttggcagtgtcatctctgagaaacagataaataaagtttatttactatataacaaaaaaaaaaaaaaaa

SEQ ID NO: 14800 - DNA, 3308 bp, Homo sapiens
tcccggtagccgcagctgtcttttccggcccccgtgcactctccgcccgagcggagccccccggctcgcggggatcgcccccgagcgctgcgtcctgcgggtcacctaacccatttgtggcttcctctacctgtgctcagccatggccagcgagagctcacctctgctggcctaccggctcctgggggaggagggggttgccctccctgccaatggggccgggggtcctggaggggcgtctgcccggaagctgtccaccttcctgggtgtggtggtgcccactgtcctgtccatgttcagcatagttgtttttctgaggattgggttcgtggtgggtcatgctgggctactgcaggccctggccatgctgctggttgcctacttcatcctggcactcaccgtcctctctgtctgtgccatcgccaccaatggagccgtgcaggggggcggagcctacttcatgatcagccgcacactggggcccgaggtcgggggcagcattgggctcatgttctacctggctaacgtctgtggctgtgccgtctccctcctggggctggtggagtctgtgcttgatgtcttcggggccgatgccacagggcccagtgggctccgggtcctgccccagggctacggctggaacctgctgtatggctccctgctgctgggccttgtgggtggggtctgcaccctgggagccggcctctatgcccgggcctcattcctcacattcctgctggtctctggctccctggcctctgtgctcatcagttttgtggctgtggggccgagggacatccgcttgactcctaggcctggccccaatggctcctccctgccgccccggtttggccacttcaccggcttcaacagcagtaccctgaaggacaacttgggcgctggctatgctgaggactacaccacgggagccgtgatgaattttgccagcgtctttgctgtcctctttaacggctgtacaggcatcatggctggggccaacatgtcaggggagctgaaggaccccagccgggcgatccctctgggcacgatcgtcgccgtcgcctacaccttcttcgtctatgtcctgcttttctttctctccagcttcacttgtgacaggaccctgctgcaggaagactatgggttcttccgcgccatcagcctgtggcccccactggtgttgatcggaatctatgccacagcgctctcagcgtccatgagctcgctcattggtgcctcccgcatcctccatgccctggcccgggatgacctctttggcgtgatcttggcaccggccaaggttgtgtcccgagggggaaacccctgggcagctgtactttattcttggggcctggtgcagctggtgctcctggctgggaagctgaacacactggctgctgtggtcactgtcttctacctggtggcctatgctgccgtggacctgtcctgcctgagcctggagtgggcctcggcccccaacttccgccccaccttcagcctgttctcctggcacacctgcctgctgggggtggcctcctgcctgctcatgatgttcctcatcagtcctggcgcggctggtggctccctgctcctcatgggtctgctggctgccctgctcaccgcgcgaggaggccccagtagctggggctatgtcagccaggccttgcttttccaccaggtgcgtaagtatctgcttcggctggacgtccggaaggatcacgtgaagttctggcggccccagctgctgctcctggtggggaacccccggggcgccctgcctctgctgcggttggccaaccagcttaagaagggggggctgtatgtgctgggccacgtcaccctgggagacctcgactccctgccctcggaccctgtacagccgcagtatggggcatggctcagcctggtggaccgtgcccaggtgaaggcttttgtggatctaaccctctcaccctccgtgcgccagggggctcagcatctgctgcgaatctccggcctcggtggcatgaagcccaacacgttggtcctaggtttctacgatgacgctccaccgcaggaccatttcctgacggacccggctttctctgagcctgcagacagcaccagggagggcagttccccagctctgagcaccctgttccctcctccccgggctcctgggagcccccgggccctcaatccccaggactatgtggccacggtggccgacgccctcaagatgaacaagaatgtggtgctggcccgggccagcggggccttgccccctgagcggctgagccgggggtctgggggcacctctcagctgcaccatgtggacgtgtggcccctcaacctgctgcggccccggggtgggcccggctatgtggatgtctgcggcctcttcctgctgcagatggcaaccatcttgggcatggtgcccgcttggcatagcgcccggctccggatcttcctgtgcctggggcctcgggaggcgcctggggcggccgaggggcggctgcgggcactgctgagccaactgaggatccgggctgaggtgcaggaggtggtgtggggcgagggggccggggctggggaacccgaggcggaggaggaaggggactttgtgaacagtgggcggggagacgcagaggcagaggccctggcacgcagcgccaacgccctggttcgggcccagcaggggcgcggcacaggaggagggccgggtgggccggagggtggggatgctgagggccccatcacagccctcaccttcctgtacttgcctcggccgccagccgatcccgcccgatacccccgctacctggcgctactggagactctaacccgagacctgggccccacgctgctggttcatggggtcactccagtcacctgcactgatctgtgatgcccctgcctccagggctaggtagagagggcccaggcaggcggcctatcctgatccttggaggaggaggaagaggaggccactgtggcccgtggccctgcccttgggacgtggagcccaggggaggtttgaaggggatcctgggcttgggcatcacgcccacctcctttggcagagggaccccagcacactaactctgggtggctgtccccaccgtgcaggggagggagtccgcagcctcccttcactggtgccttgatgctaggggccaggcctcctctgtgactctgggctacctcagtttccccattttggccagactcaccggcccactggggtggtgatgttttcgttctgttttatttttctaactctgctgaccatgaataaaagaccaaaacactacaaaaaaaaaaaaaag

SEQ ID NO: 14801 - DNA, 2708 bp, Homo sapiens
atactcctaagctcctcccccggcggcgagccagggagaaaggatggccggcctggcggcgcggttggtcctgctagctggggcagcggcgctggcgagcggctcccagggcgaccgtgagccggtgtaccgcgactgcgtactgcagtgcgaagagcagaactgctctgggggcgctctgaatcacttccgctcccgccagccaatctacatgagtctagcaggctggacctgtcgggacgactgtaagtatgagtgtatgtgggtcaccgttgggctctacctccaggaaggtcacaaagtgcctcagttccatggcaagtggcccttctcccggttcctgttctttcaagagccggcatcggccgtggcctcgtttctcaatggcctggccagcctggtgatgctctgccgctaccgcaccttcgtgccagcctcctcccccatgtaccacacctgtgtggccttcgcctgggtgtccctcaatgcatggttctggtccacagttttccacaccagggacactgacctcacagagaaaatggactacttctgtgcctccactgtcatcctacactcaatctacctgtgctgcgtcaggaccgtggggctgcagcacccagctgtggtcagtgccttccgggctctcctgctgctcatgctgaccgtgcacgtctcctacctgagcctcatccgcttcgactatggctacaacctggtggccaacgtggctattggcctggtcaacgtggtgtggtggctggcctggtgcctgtggaaccagcggcggctgcctcacgtgcgcaagtgcgtggtggtggtcttgctgctgcaggggctgtccctgctcgagctgcttgacttcccaccgctcttctgggtcctggatgcccatgccatctggcacatcagcaccatccctgtccacgtcctctttttcagctttctggaagatgacagcctgtacctgctgaaggaatcagaggacaagttcaagctggactgaagaccttggagcgagtctgccccagtggggatcctgcccccgccctgctggcctcccttctcccctcaacccttgagatgattttctcttttcaacttcttgaacttggacatgaaggatgtgggcccagaatcatgtggccagcccaccccctgttggccctcaccagccttggagtctgttctagggaaggcctcccagcatctgggactcgagagtgggcagcccctctacctcctggagctgaactggggtggaactgagtgtgctcttagctctaccgggaggacagctgcctgtttcctccccatcagcctcctccccacatccccagctgcctggctgggtcctgaagccctctgtctacctgggagaccagggaccacaggccttagggatacagggggtccccttctgttaccaccccccaccctcctccaggacaccactaggtggtgctggatgcttgttctttggccagccaaggttcacggcgattctccccatgggatcttgagggaccaagctgctgggattgggaaggagtttcaccctgaccattgccctagccaggttcccaggaggcctcaccatactccctttcagggccagggctccagcaagcccagggcaaggatcctgtgctgctgtctggttgagagcctgccaccgtgtgtcgggagtgtgggccaggctgagtgcataggtgacagggccgtgagcatgggcctgggtgtgtgtgagctcaggcctaggtgcgcagtgtggagacgggtgttgtcggggaagaggtgtggcttcaaagtgtgtgtgtgcagggggtgggtgtgttagcgtgggttaggggaacgtgtgtgcgcgtgctggtgggcatgtgagatgagtgactgccggtgaatgtgtccacagttgagaggttggagcaggatgagggaatcctgtcaccatcaataatcacttgtggagcgccagctctgcccaaggcgccacctgggcggacagccaggagctctccatggccaggctgcctgtgtgcatgttccctgtctggtgcccctttgcccgcctcctgcaaacctcacagggtccccacacaacagtgccctccagaagcagcccctcggaggcagaggaaggaaaatggggatggctggggctctctccatcctccttttctccttgccttcgcatggctggccttcccctccaaaacctccattcccctgctgccagcccctttgccatagcctgattttggggaggaggaaggggcgatttgagggagaaggggagaaagcttatggctgggtctggtttcttcccttcccagagggtcttactgttccagggtggccccagggcaggcaggggccacactatgcctgcgccctggtaaaggtgacccctgccatttaccagcagccctggcatgttcctgccccacaggaatagaatggagggagctccagaaactttccatcccaaaggcagtctccgtggttgaagcagactggatttttgctctgcccctgaccccttgtccctctttgagggaggggagctatgctaggactccaacctcagggactcgggtggcctgcgctagcttcttttgatactgaaaacttttaaggtgggagggtggcaagggatgtgcttaataaatcaattccaagcctcaaaaaaaaaaaaaaaaaaaaaa

SEQ ID NO: 14802 - DNA, 1383 bp, Homo sapiens
gtggctccaggccggaagagggagtctgtaggggcgggccggctggcgtcccctttccggccggtccccatggaggcgctggggaagctgaagcagttcgatgcctaccccaagactttggaggacttccgggtcaagacctgcgggggcgccaccgtgaccattgtcagtggccttctcatgctgctactgttcctgtccgagctgcagtattacctcaccacggaggtgcatcctgagctctacgtggacaagtcgcggggagataaactgaagatcaacatcgatgtactttttccgcacatgccttgtgcctatctgagtattgatgccatggatgtggccggagaacagcagctggatgtggaacacaacctgttcaagcaacgactagataaagatggcatccccgtgagctcagaggctgagcggcatgagcttgggaaagtcgaggtgacggtgtttgaccctgactccctggaccctgatcgctgtgagagctgctatggtgctgaggcagaagatatcaagtgctgtaacacctgtgaagatgtgcgggaggcatatcgccgtagaggctgggccttcaagaacccagatactattgagcagtgccggcgagagggcttcagccagaagatgcaggagcagaagaatgaaggctgccaggtgtatggcttcttggaagtcaataaggtggccggaaacttccactttgcccctgggaagagcttccagcagtcccatgtgcacgtacatgctgtggagatccatgacttgcagagctttggccttgacaacatcaacatgacccactacatccagcacctgtcatttggggaggactatccaggcattgtgaaccccctggaccacaccaatgtcactgcgccccaagcctccatgatgttccagtactttgtgaaggtggtgcccactgtgtacatgaaggtggacggagaggtactgaggacaaatcagttctctgtgaccagacatgagaaggttgccaatgggctgttgggcgaccaaggccttcccggagtcttcgtcctctatgagctctcgcccatgatggtgaagctgacggagaagcacaggtccttcacccacttcctgacaggtgtgtgcgccatcattgggggcatgttcacagtggctggactcatcgattcgctcatctaccactcagcacgagccatccagaagaaaattgatctagggaagacaacgtagtcaccctcggtgcttcctctgtctcctctttctccctggcctgtggttgtcccccagcctctgccaccctccacctcctcggtcagccccagccccaggttgataaatctattgattgattgtgatagtaaaaaaaaaaaaaaaaaa

SEQ ID NO: 14803 - DNA, 1368 bp, Homo sapiens
gtggctccaggccggaagagggagtctgtaggggcgggccggctggcgtcccctttccggccggtccccatggaggcgctggggaagctgaagcagttcgatgcctaccccaagactttggaggacttccgggtcaagacctgcgggggcgccaccgtgaccattgtcagtggccttctcatgctgctactgttcctgtccgagctgcagtattacctcaccacggaggtgcatcctgagctctacgtggacaagtcgcggggagataaactgaagatcaacatcgatgtactttttccgcacatgccttgtgcctatctgagtattgatgccatggatgtggccggagaacagcagctggatgtggaacacaacctgttcaagcaacgactagataaagatggcatccccgtgagctcagaggctgagcggcatgagcttgggaaagtcgaggtgacggtgtttgaccctgactccctggaccctgatcgctgtgagagctgctatggtgctgaggcagaagatatcaagtgctgtaacacctgtgaagatgtgcgggaggcatatcgccgtagaggctgggccttcaagaacccagatactattgagcagtgccggcgagagggcttcagccagaagatgcaggagcagaagaatgaaggctgccaggtgtatggcttcttggaagtcaataaggtggccggaaacttccactttgcccctgggaagagcttccagcagtcccatgtgcacgtccatgacttgcagagctttggccttgacaacatcaacatgacccactacatccagcacctgtcatttggggaggactatccaggcattgtgaaccccctggaccacaccaatgtcactgcgccccaagcctccatgatgttccagtactttgtgaaggtggtgcccactgtgtacatgaaggtggacggagaggtactgaggacaaatcagttctctgtgaccagacatgagaaggttgccaatgggctgttgggcgaccaaggccttcccggagtcttcgtcctctatgagctctcgcccatgatggtgaagctgacggagaagcacaggtccttcacccacttcctgacaggtgtgtgcgccatcattgggggcatgttcacagtggctggactcatcgattcgctcatctaccactcagcacgagccatccagaagaaaattgatctagggaagacaacgtagtcaccctcggtgcttcctctgtctcctctttctccctggcctgtggttgtcccccagcctctgccaccctccacctcctcggtcagccccagccccaggttgataaatctattgattgattgtgatagtaaaaaaaaaaaaaaaaaa

SEQ ID NO: 14804 - DNA, 2988 bp, Homo sapiens
gccatggccggcctgtcggacctggaactgcggcgggagctgcaggccctgggcttccagccaggacccatcaccgacaccacccgggatgtctaccgcaacaagctgcgccgcctgcggggcgaggcccggctgcgcgacgaggagcggctgcgggaggaggcccggccgcggggcgaggagcggttacgggaagaggcccggttacgcgaggatgcgccgctgcgcgcccggcccgccgcggcctctccgcgggcggagccctggctctcccagccggcctcgggctcggcctacgcgacccctggggcctacggtgatatccggccctccgcggcttcctgggtagggagccgcggcctcgcctatcctgcccgcccggcgcaactcaggcgccgcgcctcggtccggggcagctccgaggaggacgaggacgcccggacgcccgacagggccacgcagggcccgggtctcgcggcccgccgctggtgggcagcgtctcccgccccggcgcggctgccttcctccctcctcggtcccgacccgcgcccgggcctgcgggcgactcgagcgggccctgctggcgcggcgagggcccggcctgaggtggggcgccggctggagcgctggctctctcggcttctgctctgggccagcctagggctactgctcgtcttcctgggcatcctttgggtgaagatgggcaagccctcagcgccgcaggaggcggaggacaacatgaagttattgccagtggactgtgagagaaaaacagatgagttctgtcaggccaagcagaaggcagccttgctggagctgctgcatgaactctacaatttcctggccatccaagctggtaattttgagtgtggaaatccagagaatctaaaaagcaaatgcattcctgttatggaagcccaagaatatatagccaatgtgaccagcagctcctccgccaagtttgaagccgcactgacctggatactgagcagtaacaaggacgtgggcatctggttgaaaggagaagaccagtctgaattggtgacgactgtggacaaggtggtctgcctggaatctgcccacccccgcatgggtgttggctgccgcctgagccgagccttgctcactgctgtcaccaacgtgctcatcttcttctggtgcttggcttttttgtgggggctcctaattctcctaaaatatcggtggcgaaagttagaagaggaggaacaagccatgtatgagatggtgaagaagattatagacgtggtccaggaccattacgtggactgggagcaggacatggagcgctatccatatgtaggcatcctgcacgtgcgcgacagcttgatccctccacagagccggaggcgcatgaagcgtgtctgggaccgagctgtggagttcctggcctccaacgaatcccggatccagacggagtcccaccgcgttgcaggagaggacatgctggtgtggagatggactaagccctcttccttctctgactcagagcgataagccccgggcggggacttgttcctggtcagcctgtcccaggacagcccactccagaggcacaggagggtcaccaggcctgcggtgctgaattcacacttgccttgactttcagtctcgtcctgacacgattccaaaggtctgccatactcttcagaggagttcggctcgcaggaaaatgtgggcttcctttaaagggagggggagaagccagggtgatagcccagactctgccctgttgtgctggcagaaacggggagaagggttgagttttcatgaatagaaaacaagagcagcagctgtcaggcccagctgacaagcgtggggctggtgggctggggcatggccacgccagggagtctgtcacctgggaggtggggcaaggatggtgtttcgggtggcgggatggggagcagcttggtccatgtgccttcagggggttgttacctgagagctccagggtgaagggagaaagcctgtgctctggctggctgggcctctatcctgaagagggaaggtgctagaaattagaacaagtgactgtaggggggaccgtctagaaacaccaggcccagacacacggtccctcaggtcaggaggagtgagcagccggcacagcctcctgggaggatcccgaagtagggactggggctgagagcagagaggagggtcgggcgggcccgcctcagtgttgcttctcacagaagctgcgactctagaccaggcctgcagccagaacgccgattccgggagcttgggagccctgcgtcagggcccagagcctcgcacttgctgtgtgcgaagatcgccttgctttactgtgaccacagccccgacgcggggctgtttaacaagaacttcagcgcagccggcgtttctgttaccccggccgcggctcttggcggcgggagaggcgcagtggctgcaggctgccccctgccggccacaagggagcagcgtccgcgccgccgcccaccggccctcccgccagctcctcagcctgctccctgggaggcaggctccagaagcaccccgacggggggccttattaagtgcgagaagcctctccagcgagtcttccccgtgtgtcctcatctgcggcaggcaggagagggggagcaaacaggaaattccacagctgcctccagaaacattaaccacccctctctagtcttactggtattttttgtttccttaataaagctccagtctccctcatttgagcaatactctcatttcctctgatgtctggatgatcggcagggcaggaatctgagcgctggccccgtggtgaggccatgttctcataatcaggctccagccagaaaaataagaaacaccgcaacaggcttcagtatcagggctgaaactgctggatgaataaactatttattaaaaacggaaaaaaaaaaaaaaaaaaaaaaaaaaaaaaaaaaaaaaaaaaaaaaaaaaaaaaaaaaaaaaaaaaaaaaaaaa

SEQ ID NO: 14805 - DNA, 1513 bp, Homo sapiens
cgcccctgacaccattcctcccttcccccctccaccggccgcgggcataaaaggcgccaggtgagggcctcgccgctcctcccgcgaatcgcagcttctgagaccagggttgctccgtccgtgctccgcctcgccatgacttcctacagctatcgccagtcgtcggccacgtcgtccttcggaggcctgggcggcggctccgtgcgttttgggccgggggtcgcctttcgcgcgcccagcattcacgggggctccggcggccgcggcgtatccgtgtcctccgcccgctttgtgtcctcgtcctcctcgggggcctacggcggcggctacggcggcgtcctgaccgcgtccgacgggctgctggcgggcaacgagaagctaaccatgcagaacctcaacgaccgcctggcctcctacctggacaaggtgcgcgccctggaggcggccaacggcgagctagaggtgaagatccgcgactggtaccagaagcaggggcctgggccctcccgcgactacagccactactacacgaccatccaggacctgcgggacaagattcttggtgccaccattgagaactccaggattgtcctgcagatcgacaatgcccgtctggctgcagatgacttccgaaccaagtttgagacggaacaggctctgcgcatgagcgtggaggccgacatcaacggcctgcgcagggtgctggatgagctgaccctggccaggaccgacctggagatgcagatcgaaggcctgaaggaagagctggcctacctgaagaagaaccatgaggaggaaatcagtacgctgaggggccaagtgggaggccaggtcagtgtggaggtggattccgctccgggcaccgatctcgccaagatcctgagtgacatgcgaagccaatatgaggtcatggccgagcagaaccggaaggatgctgaagcctggttcaccagccggactgaagaattgaaccgggaggtcgctggccacacggagcagctccagatgagcaggtccgaggttactgacctgcggcgcacccttcagggtcttgagattgagctgcagtcacagctgagcatgaaagctgccttggaagacacactggcagaaacggaggcgcgctttggagcccagctggcgcatatccaggcgctgatcagcggtattgaagcccagctgggcgatgtgcgagctgatagtgagcggcagaatcaggagtaccagcggctcatggacatcaagtcgcggctggagcaggagattgccacctaccgcagcctgctcgagggacaggaagatcactacaacaatttgtctgcctccaaggtcctctgaggcagcaggctctggggcttctgctgtcctttggagggtgtcttctgggtagagggatgggaaggaagggacccttacccccggctcttctcctgacctgccaataaaaatttatggtccaagggaaaaaaaaaaaaaaaaaaaaaaaaaaaaaaaaaaaaaaaaaaaaaaaaaa

SEQ ID NO: 14806 - DNA, 2217 bp, Homo sapiens
ggggcggtgccgaggccgggccggagcggggcgaagggggccgagcggcgggccgggccgggccgggcagggccggggcgtgggccggcaggaagatggcgaacgtggggctgcagttccaggcgagcgcgggggactcggacccacagagccggcccctgctgctgctcgggcagctgcaccacctgcaccgcgtgccctggagccacgtccgcgggaagctgcagccccgggtcaccgaggagctctggcaggctgccctgagcacgctcaaccccaaccccacggacagctgtcccctctacctgaactacgccaccgtggctgccctgccctgcagggtgagccggcacaacagcccctcggccgcccacttcatcacgcggctggtgcggacctgcctgccgcccggagcgcatcgctgcattgtgatggtctgcgagcagccggaggtctttgcttccgcctgtgccctggcccgggccttcccgctgttcacccaccgctcaggtgcctctcggcgcttggagaagaagacggtcaccgtggagtttttcctggtgggacaagacaacgggccggtggaggtgtccacattgcagtgcttagcgaatgccacagacggcgtgcggctagcagcccgcatcgtggacacaccctgcaatgagatgaacaccgacaccttcctcgaggagattaacaaagttggaaaggagctggggatcatcccaaccatcatccgggatgaggaactgaagacgagaggatttggaggaatctatggggttggcaaagccgccctgcatcccccagccctggccgtcctcagccacaccccagatggagccacgcagaccatcgcctgggtgggcaaaggcatcgtctatgacactggaggcctcagcatcaaagggaagactaccatgccggggatgaagcgagactgcgggggtgctgcggccgtcctgggggccttcagagccgcaatcaagcagggtttcaaagacaacctccacgctgtgttctgcttggctgagaactcggtggggcccaatgcgacaaggccagatgacatccacctgctgtactcagggaagacggtggaaatcaacaacacggatgccgagggcaggctggtgctggcagatggcgtgtcctatgcttgcaaggacctgggggccgacatcatcctggacatggccaccctgaccggggctcagggcattgccacagggaagtaccacgccgcggtgctcaccaacagcgctgagtgggaggccgcctgtgtgaaggcgggcaggaagtgtggggacctggtgcacccgctggtctactgccccgagctgcacttcagcgagttcacctcagctgtggcggacatgaagaactcagtggcggaccgagacaacagccccagctcctgtgctggcctcttcatcgcctcacacatcggcttcgactggcccggagtctgggtccacctggacattgctgcaccggtgcatgctggtgagcgagccacaggcttcggtgtggccctcctgctggcgctcttcggccgtgcctctgaggaccctctgctgaacctggtgtccccactgggctgtgaggtggatgtcgaggagggggacctggggagggactccaagagacgcaggcttgtgtgagcctcctgcctcggccctgacaaacggggatcttttacctcactttgcactgattaattttaagcaattgaaagattgcccttcatatgggttttggtttgtctttctggtcgtcagcgtggtggtggaaacagctgaagttttaggagacagcttagggtttggtgcgggccacggggaggggaccgggaagcgctggggcttgtttctgtttgttacttacaggactgagacatcttctgtaaactgctacccctggggccttctgcaccccggggtgaggcctcctgcctgcctggtgccctgtcccagccccaggtcctgtgcagggcacctgcgtggctgacagccaggctcttactccagccggggctgccagcgcatccagccagcccagccctgtgaaagatggagctgacttgctgcaggggacctgatttatagggcaagagaagtcacactccggcctctcagaattcacttgaggttcaattaaatacagtcacaccgccccctcaaaaaaaaaaaaaaaaaaaaaaaaaaaaaaaaa

SEQ ID NO: 14807 - DNA, 3521 bp, Homo sapiens
aggaagcgggaagttacttagcacggttccgggtttctcgcgccccgcctgtcccccctccctatcactgctactggctcttggtccctccgttggactgtcctgcggagagaaaccccagcccatcggtctgcgctgggaccgcccgccgcgcatctgcccttcttcgctgactccgccccgcatctggccagacccgcctcgcgtcagagctgacccactcactgcgcgtttgccagtcagtctctccggacctgcctcgagcctcaggctgctgaaatcaccgcgcctcactcgcctcgacagtgattctgagtctgcttttagcttccttttgcctgccttggctttttctgttcgtgaacagctgtttggcccatagcttagagaaagcagccttttttctcttcaaagagaacctcctcccagtgctcagagagatggggagcggggagcctaatcctgctggcaagaaaaagaagtatctcaaggccgctctgtacgtgggtgacttggacccagatgtcaccgaggacatgctctataagaagttcaggcctgctggccctctgcgattcacccgaatctgccgtgatccggtgacccgcagccccctgggctatgggtatgttaacttccgctttcccgcggatgcagagtgggccttgaacaccatgaattttgatttgattaatggaaaaccattccgccttatgtggtctcagccagatgaccgcttaagaaagtctggagtgggaaatatattcatcaaaaacctggacaaatccatagacaatagggccctgttttacttattttctgcttttgggaacattctgtcctgcaaagtcgtatgcgatgacaacggctctaagggttatgcctatgttcactttgacagcctggccgctgccaatagagccatctggcacatgaatggagtgcggctcaacaaccgccaggtgtatgttggcagattcaaattcccagaagagcgggcggctgaggtcagaaccagggatagagcaactttcaccaatgttttcgttaaaaacattggagacgacatagatgacgaaaaactgaaggaacttttctgtgaatatgggccaactgagagtgttaaagtaataagagatgccagtgggaaatctaaaggctttggatttgtgagatatgagacacacgaggctgcccaaaaggctgtgctagacttgcatggaaagtccatcgatggaaaagtcctctatgtagggcgagcacagaagaaaattgaacgcctggctgagttgaggcggagatttgaacggctgaggttaaaagaaaaaagtcggcccccaggggtgcctatctatattaagaacttggatgagacaatcaatgatgaaaaactgaaggaggaattttcttcctttgggtcaattagtcgggccaaagtgatgatggaagtggggcaaggcaaaggatttggtgtggtctgcttttcctcttttgaagaggctaccaaagcagtggatgagatgaatggccgcatagtgggctccaagcccctgcatgtcaccctgggccaggccaggcgcaggtgctgagaataagaatgctcagtttgtttcagccttagttggtgcctccttagtttgggctcctttgtgataaggggttattttatgctaattcacaagttttttttgaagtgaattcttttgaaaaaaaaatgcaaaactagaaaactttattcattttagaatagaacataatttctaactgtaaaattgtcattttgtactttttttgatgtaatatccttagaaatctgtagaataaagtgtattcctccacttttttttcctgaacagtcaaggtgaggcaattgattgagtatatttcccttcttatttcagtaatactctattttttttcatgaaaatgtcaacatggttcttctgaatctatcacagtgaaaagttctaacttgtttttgagaagtcagtacagcaggggaaaacatatgtgatgcaattaacatctgcataatttcacttaaaattattatgcaaaaatgaatgttttttcaaaaaatgtgaaatgtattttattttctttatttgtattcttgtttcattttttaatatgttgtgaacatgctacagatttgatagtacttttgactaaatgttgggagtggtcgtattaacttcttgcccaaagaagtaagcatattggtgttttctcaattagtcactgagaaaattaacactttaggcagtggctatttaaagtaggaattgcatcttaaaaacctttcctaagagatttggtatgtgaggatactttcagtaccactcctaccattcatttttctaaattccttagtacatatacttggatcatgttaaattaacaagaaagatgaataactgcgctgaattgcctttacctataaataatttaatattttaccttcgggttttatcaactgtcaatataaaaggcagtactccacagaatgatgttgaaaaacttcttcgaagaacaccttctattaaacttgttatctcttgtaaattattgtgtgtgtccttttgataatattcacaggtgtttcaaaggtaaggaataggttgtctcttggattaagtcatatgcctccagccattatatgagaactgtgaaaccaatatggttttctttatgtcttggctgcttgaaaattaaaaaaaaaaaaggtttgttcaatattgccgttacatttattagcctgtaatttctaaattggagattctctacatttcacttgcagtttcctgttctcctcattgcctgccttccattcatattacacttatttttctattttttgtattacctttttaaaaatatataccagttcaagtccttttaggaagaagaaaatacctaatttatgtaaaatttaaataattacttttttataatatgattcacttatgccacagattcaacattagaatatgttttatctctactgtcagttttattaccttatatacaaatcttcattttcatacatagtacaatgtaaatatataactttgttaacacttttgttagctctttgaccataaaataatgacaataagctgtttctatgtatttgtttatctacaaattacaggtttatccatttgcaaatattttcaaaatggaaatcactgtttatattgattataaacataagacatgctcattgtaaaaaatgtacacaaggcagaaggaagtaaaatttccacagttcagaaataccacaattaatattttcaatgtgtaaatatcttttcatattttttcctacgtatacacaaacattttgaccaaaaatccacactatatgtactgttctgtatttttaattttaaactgaacaataatcatcttttcctgacaataaatatcaatctctatcatcaaaaaaaaaaaaaaaaaaaaaaaaaaaaaaaaaaaaaaaaaaaaaaaaaaaaaaaaaaaaaaaaaaaaaaaaaaaa

SEQ ID NO: 14808 - DNA, 2059 bp, Homo sapiens
agcacagaaggaggaaggacagcacagctgacagccgtactcaggaagcttctggatcctaggcttatctccacagaggagaacacacaagcagcagagaccatggggcccctctcagcccctccctgcacacagcgcatcacctggaagggggtcctgctcacagcatcacttttaaacttctggaatccgcccacaactgcccaagtcacgattgaagcccagccacccaaagtttctgaggggaaggatgttcttctacttgtccacaatttgccccagaatcttgctggctacatttggtacaaagggcaaatgacatacctctaccattacattacatcatatgtagtagacggtcaaagaattatatatgggcctgcatacagtggaagagaaagagtatattccaatgcatccctgctgatccagaatgtcacgcaggaggatgcaggatcctacaccttacacatcataaagcgacgcgatgggactggaggagtaactggacatttcaccttcaccttacacctggagactcccaagccctccatctccagcagcaacttaaatcccagggaggccatggaggctgtgatcttaacctgtgatcctgcgactccagccgcaagctaccagtggtggatgaatggtcagagcctccctatgactcacaggttgcagctgtccaaaaccaacaggaccctctttatatttggtgtcacaaagtatattgcaggaccctatgaatgtgaaatacggaacccagtgagtgccagccgcagtgacccagtcaccctgaatctcctcccaaagctgtccaagccctacatcacaatcaacaacttaaaccccagagagaataaggatgtcttaaccttcacctgtgaacctaagagtaagaactacacctacatttggtggctaaatggtcagagcctccctgtcagtcccagggtaaagcgacccattgaaaacaggatcctcattctacccaatgtcacgagaaatgaaacaggaccttatcaatgtgaaatacgggaccgatatggtggcatccgcagtgacccagtcaccctgaatgtcctctatggtccagacctccccagcatttacccttcattcacctattaccgttcaggagaaaacctctacttgtcctgcttcgccgagtctaacccacgggcacaatattcttggacaattaatgggaagtttcagctatcaggacaaaagctctctatcccccaaataactacaaagcatagtgggctctatgcttgctctgttcgtaactcagccactggcaaggaaagctccaaatccatcacagtcaaagtctctgactggatattaccctgaattctactagttcctccaattccattttctcccatggaatcacgaagagcaagacccactctgttccagaagccctataagctggaggtggacaactcgatgtaaatttcatgggaaaacccttgtacctgacatgtgagccactcagaactcaccaaaatgttcgacaccataacaacagctactcaaactgtaaaccaggataacaagttgatgacttcacactgtggacagtttttccaaagatgtcagaacaagactccccatcatgataaggctcccacccctcttaaccgtccttgctcatgcctgcctctttcacttggcaggataatgcagtcattagaatttcacatgtagtagcttctgagggtaacaacagagtgtcagatatgtcatctcaacctcaaacttttacgtaacatctcaggggaaatgtggctctctccatcttgcatacagggctcccaatagaaatgaacacagagatattgcctgtgtgtttgcagagaagatggtttctataaagagtaggaaagctgaaattatagtagagtctcctttaaatgcacattgtgtggatggctctcaccatttcctaagagatacagtgtaaaacgtgacagtaatactgattctagcagaataaaacatgtaccacatttgctaaaaaaaaaaaaaaaaaaaaaaaaaaaaa

SEQ ID NO: 14809 - DNA, 1143 bp, Homo sapiens
tgccctgcgcccgcaacccgagccgcacccgccgcggacggagcccatgcgcggggcgaaccgcgcgcccccgcccccgccccgccccggcctcggccccggccctggccccgggggcagtcgcgcctgtgaacggtggggcaggagaccctgtaggaggaccccgggccgcaggcccctgaggagcgatgacggaatataagctggtggtggtgggcgccggcggtgtgggcaagagtgcgctgaccatccagctgatccagaaccattttgtggacgaatacgaccccactatagaggattcctaccggaagcaggtggtcattgatggggagacgtgcctgttggacatcctggataccgccggccaggaggagtacagcgccatgcgggaccagtacatgcgcaccggggagggcttcctgtgtgtgtttgccatcaacaacaccaagtcttttgaggacatccaccagtacagggagcagatcaaacgggtgaaggactcggatgacgtgcccatggtgctggtggggaacaagtgtgacctggctgcacgcactgtggaatctcggcaggctcaggacctcgcccgaagctacggcatcccctacatcgagacctcggccaagacccggcagggcagccgctctggctctagctccagctccgggaccctctgggaccccccgggacccatgtgacccagcggcccctcgcgctggagtggaggatgccttctacacgttggtgcgtgagatccggcagcacaagctgcggaagctgaaccctcctgatgagagtggccccggctgcatgagctgcaagtgtgtgctctcctgacgcagcacaagctcaggacatggaggtgccggatgcaggaaggaggtgcagacggaaggaggaggaaggaaggacggaagcaaggaaggaaggaagggctgctggagcccagtcaccccgggaccgtgggccgaggtgactgcagaccctcccagggaggctgtgcacagactgtcttgaacatcccaaatgccaccggaaccccagcccttagctcccctcccaggcctctgtgggcccttgtcgggcacagatgggatcacagtaaattattggatggtcttgaaaaaaaaaaaaaaaaaa

SEQ ID NO: 14810 - DNA, 5312 bp, Homo sapiens
ggccgcggcggcggaggcagcagcggcggcggcagtggcggcggcgaaggtggcggcggctcggccagtactcccggcccccgccatttcggactgggagcgagcgcggcgcaggcactgaaggcggcggcggggccagaggctcagcggctcccaggtgcgggagagaggcctgctgaaaatgactgaatataaacttgtggtagttggagctggtggcgtaggcaagagtgccttgacgatacagctaattcagaatcattttgtggacgaatatgatccaacaatagaggattcctacaggaagcaagtagtaattgatggagaaacctgtctcttggatattctcgacacagcaggtcaagaggagtacagtgcaatgagggaccagtacatgaggactggggagggctttctttgtgtatttgccataaataatactaaatcatttgaagatattcaccattatagagaacaaattaaaagagttaaggactctgaagatgtacctatggtcctagtaggaaataaatgtgatttgccttctagaacagtagacacaaaacaggctcaggacttagcaagaagttatggaattccttttattgaaacatcagcaaagacaagacagggtgttgatgatgccttctatacattagttcgagaaattcgaaaacataaagaaaagatgagcaaagatggtaaaaagaagaaaaagaagtcaaagacaaagtgtgtaattatgtaaatacaatttgtacttttttcttaaggcatactagtacaagtggtaatttttgtacattacactaaattattagcatttgttttagcattacctaatttttttcctgctccatgcagactgttagcttttaccttaaatgcttattttaaaatgacagtggaagtttttttttcctctaagtgccagtattcccagagttttggtttttgaactagcaatgcctgtgaaaaagaaactgaatacctaagatttctgtcttggggtttttggtgcatgcagttgattacttcttatttttcttaccaattgtgaatgttggtgtgaaacaaattaatgaagcttttgaatcatccctattctgtgttttatctagtcacataaatggattaattactaatttcagttgagaccttctaattggtttttactgaaacattgagggaacacaaatttatgggcttcctgatgatgattcttctaggcatcatgtcctatagtttgtcatccctgatgaatgtaaagttacactgttcacaaaggttttgtctcctttccactgctattagtcatggtcactctccccaaaatattatattttttctataaaaagaaaaaaatggaaaaaaattacaaggcaatggaaactattataaggccatttccttttcacattagataaattactataaagactcctaatagcttttcctgttaaggcagacccagtatgaaatggggattattatagcaaccattttggggctatatttacatgctactaaatttttataataattgaaaagattttaacaagtataaaaaattctcataggaattaaatgtagtctccctgtgtcagactgctctttcatagtataactttaaatcttttcttcaacttgagtctttgaagatagttttaattctgcttgtgacattaaaagattatttgggccagttatagcttattaggtgttgaagagaccaaggttgcaaggccaggccctgtgtgaacctttgagctttcatagagagtttcacagcatggactgtgtccccacggtcatccagtgttgtcatgcattggttagtcaaaatggggagggactagggcagtttggatagctcaacaagatacaatctcactctgtggtggtcctgctgacaaatcaagagcattgcttttgtttcttaagaaaacaaactcttttttaaaaattacttttaaatattaactcaaaagttgagattttggggtggtggtgtgccaagacattaattttttttttaaacaatgaagtgaaaaagttttacaatctctaggtttggctagttctcttaacactggttaaattaacattgcataaacacttttcaagtctgatccatatttaataatgctttaaaataaaaataaaaacaatccttttgataaatttaaaatgttacttattttaaaataaatgaagtgagatggcatggtgaggtgaaagtatcactggactaggaagaaggtgacttaggttctagataggtgtcttttaggactctgattttgaggacatcacttactatccatttcttcatgttaaaagaagtcatctcaaactcttagttttttttttttacaactatgtaatttatattccatttacataaggatacacttatttgtcaagctcagcacaatctgtaaatttttaacctatgttacaccatcttcagtgccagtcttgggcaaaattgtgcaagaggtgaagtttatatttgaatatccattctcgttttaggactcttcttccatattagtgtcatcttgcctccctaccttccacatgccccatgacttgatgcagttttaatacttgtaattcccctaaccataagatttactgctgctgtggatatctccatgaagttttcccactgagtcacatcagaaatgccctacatcttatttcctcagggctcaagagaatctgacagataccataaagggatttgacctaatcactaattttcaggtggtggctgatgctttgaacatctctttgctgcccaatccattagcgacagtaggatttttcaaacctggtatgaatagacagaaccctatccagtggaaggagaatttaataaagatagtgctgaaagaattccttaggtaatctataactaggactactcctggtaacagtaatacattccattgttttagtaaccagaaatcttcatgcaatgaaaaatactttaattcatgaagcttactttttttttttggtgtcagagtctcgctcttgtcacccaggctggaatgcagtggcgccatctcagctcactgcaacctccatctcccaggttcaagcgattctcgtgcctcggcctcctgagtagctgggattacaggcgtgtgccactacactcaactaatttttgtatttttaggagagacggggtttcaccctgttggccaggctggtctcgaactcctgacctcaagtgattcacccaccttggcctcataaacctgttttgcagaactcatttattcagcaaatatttattgagtgcctaccagatgccagtcaccgcacaaggcactgggtatatggtatccccaaacaagagacataatcccggtccttaggtagtgctagtgtggtctgtaatatcttactaaggcctttggtatacgacccagagataacacgatgcgtattttagttttgcaaagaaggggtttggtctctgtgccagctctataattgttttgctacgattccactgaaactcttcgatcaagctactttatgtaaatcacttcattgttttaaaggaataaacttgattatattgtttttttatttggcataactgtgattcttttaggacaattactgtacacattaaggtgtatgtcagatattcatattgacccaaatgtgtaatattccagttttctctgcataagtaattaaaatatacttaaaaattaatagttttatctgggtacaaataaacaggtgcctgaactagttcacagacaaggaaacttctatgtaaaaatcactatgatttctgaattgctatgtgaaactacagatctttggaacactgtttaggtagggtgttaagacttacacagtacctcgtttctacacagagaaagaaatggccatacttcaggaactgcagtgcttatgaggggatatttaggcctcttgaatttttgatgtagatgggcatttttttaaggtagtggttaattacctttatgtgaactttgaatggtttaacaaaagatttgtttttgtagagattttaaagggggagaattctagaaataaatgttacctaattattacagccttaaagacaaaaatccttgttgaagtttttttaaaaaaagctaaattacatagacttaggcattaacatgtttgtggaagaatatagcagacgtatattgtatcatttgagtgaatgttcccaagtaggcattctaggctctatttaactgagtcacactgcataggaatttagaacctaacttttataggttatcaaaactgttgtcaccattgcacaattttgtcctaatatatacatagaaactttgtggggcatgttaagttacagtttgcacaagttcatctcatttgtattccattgattttttttttcttctaaacattttttcttcaaacagtatataactttttttaggggatttttttttagacagcaaaaactatctgaagatttccatttgtcaaaaagtaatgatttcttgataattgtgtagtaatgttttttagaacccagcagttaccttaaagctgaatttatatttagtaacttctgtgttaatactggatagcatgaattctgcattgagaaactgaatagctgtcataaaatgaaactttctttctaaagaaagatactcacatgagttcttgaagaatagtcataactagattaagatctgtgttttagtttaatagtttgaagtgcctgtttgggataatgataggtaatttagatgaatttaggggaaaaaaaagttatctgcagatatgttgagggcccatctctccccccacacccccacagagctaactgggttacagtgttttatccgaaagtttccaattccactgtcttgtgttttcatgttgaaaatacttttgcatttttcctttgagtgccaatttcttactagtactatttcttaatgtaacatgtttacctggaatgtattttaactatttttgtatagtgtaaactgaaacatgcacattttgtacattgtgctttcttttgtgggacatatgcagtgtgatccagttgttttccatcatttggttgcgctgacctaggaatgttggtcatatcaaacattaaaaatgaccactcttttaattgaaattaacttttaaatgtttataggagtatgtgctgtgaagtgatctaaaatttgtaatatttttgtcatgaactgtactactcctaattattgtaatgtaataaaaatagttacagtgacaaaaaaaaaaaaaaa

SEQ ID NO: 14811 - DNA, 1061 bp, Homo sapiens
tgccctgcgcccgcaacccgagccgcacccgccgcggacggagcccatgcgcggggcgaaccgcgcgcccccgcccccgccccgccccggcctcggccccggccctggccccgggggcagtcgcgcctgtgaacggtggggcaggagaccctgtaggaggaccccgggccgcaggcccctgaggagcgatgacggaatataagctggtggtggtgggcgccggcggtgtgggcaagagtgcgctgaccatccagctgatccagaaccattttgtggacgaatacgaccccactatagaggattcctaccggaagcaggtggtcattgatggggagacgtgcctgttggacatcctggataccgccggccaggaggagtacagcgccatgcgggaccagtacatgcgcaccggggagggcttcctgtgtgtgtttgccatcaacaacaccaagtcttttgaggacatccaccagtacagggagcagatcaaacgggtgaaggactcggatgacgtgcccatggtgctggtggggaacaagtgtgacctggctgcacgcactgtggaatctcggcaggctcaggacctcgcccgaagctacggcatcccctacatcgagacctcggccaagacccggcagggagtggaggatgccttctacacgttggtgcgtgagatccggcagcacaagctgcggaagctgaaccctcctgatgagagtggccccggctgcatgagctgcaagtgtgtgctctcctgacgcagcacaagctcaggacatggaggtgccggatgcaggaaggaggtgcagacggaaggaggaggaaggaaggacggaagcaaggaaggaaggaagggctgctggagcccagtcaccccgggaccgtgggccgaggtgactgcagaccctcccagggaggctgtgcacagactgtcttgaacatcccaaatgccaccggaaccccagcccttagctcccctcccaggcctctgtgggcccttgtcgggcacagatgggatcacagtaaattattggatggtcttgaaaaaaaaaaaaaaaaaa

SEQ ID NO: 14812 - DNA, 5436 bp, Homo sapiens
ggccgcggcggcggaggcagcagcggcggcggcagtggcggcggcgaaggtggcggcggctcggccagtactcccggcccccgccatttcggactgggagcgagcgcggcgcaggcactgaaggcggcggcggggccagaggctcagcggctcccaggtgcgggagagaggcctgctgaaaatgactgaatataaacttgtggtagttggagctggtggcgtaggcaagagtgccttgacgatacagctaattcagaatcattttgtggacgaatatgatccaacaatagaggattcctacaggaagcaagtagtaattgatggagaaacctgtctcttggatattctcgacacagcaggtcaagaggagtacagtgcaatgagggaccagtacatgaggactggggagggctttctttgtgtatttgccataaataatactaaatcatttgaagatattcaccattatagagaacaaattaaaagagttaaggactctgaagatgtacctatggtcctagtaggaaataaatgtgatttgccttctagaacagtagacacaaaacaggctcaggacttagcaagaagttatggaattccttttattgaaacatcagcaaagacaagacagagagtggaggatgctttttatacattggtgagggagatccgacaatacagattgaaaaaaatcagcaaagaagaaaagactcctggctgtgtgaaaattaaaaaatgcattataatgtaatctgggtgttgatgatgccttctatacattagttcgagaaattcgaaaacataaagaaaagatgagcaaagatggtaaaaagaagaaaaagaagtcaaagacaaagtgtgtaattatgtaaatacaatttgtacttttttcttaaggcatactagtacaagtggtaatttttgtacattacactaaattattagcatttgttttagcattacctaatttttttcctgctccatgcagactgttagcttttaccttaaatgcttattttaaaatgacagtggaagtttttttttcctctaagtgccagtattcccagagttttggtttttgaactagcaatgcctgtgaaaaagaaactgaatacctaagatttctgtcttggggtttttggtgcatgcagttgattacttcttatttttcttaccaattgtgaatgttggtgtgaaacaaattaatgaagcttttgaatcatccctattctgtgttttatctagtcacataaatggattaattactaatttcagttgagaccttctaattggtttttactgaaacattgagggaacacaaatttatgggcttcctgatgatgattcttctaggcatcatgtcctatagtttgtcatccctgatgaatgtaaagttacactgttcacaaaggttttgtctcctttccactgctattagtcatggtcactctccccaaaatattatattttttctataaaaagaaaaaaatggaaaaaaattacaaggcaatggaaactattataaggccatttccttttcacattagataaattactataaagactcctaatagcttttcctgttaaggcagacccagtatgaaatggggattattatagcaaccattttggggctatatttacatgctactaaatttttataataattgaaaagattttaacaagtataaaaaattctcataggaattaaatgtagtctccctgtgtcagactgctctttcatagtataactttaaatcttttcttcaacttgagtctttgaagatagttttaattctgcttgtgacattaaaagattatttgggccagttatagcttattaggtgttgaagagaccaaggttgcaaggccaggccctgtgtgaacctttgagctttcatagagagtttcacagcatggactgtgtccccacggtcatccagtgttgtcatgcattggttagtcaaaatggggagggactagggcagtttggatagctcaacaagatacaatctcactctgtggtggtcctgctgacaaatcaagagcattgcttttgtttcttaagaaaacaaactcttttttaaaaattacttttaaatattaactcaaaagttgagattttggggtggtggtgtgccaagacattaattttttttttaaacaatgaagtgaaaaagttttacaatctctaggtttggctagttctcttaacactggttaaattaacattgcataaacacttttcaagtctgatccatatttaataatgctttaaaataaaaataaaaacaatccttttgataaatttaaaatgttacttattttaaaataaatgaagtgagatggcatggtgaggtgaaagtatcactggactaggaagaaggtgacttaggttctagataggtgtcttttaggactctgattttgaggacatcacttactatccatttcttcatgttaaaagaagtcatctcaaactcttagttttttttttttacaactatgtaatttatattccatttacataaggatacacttatttgtcaagctcagcacaatctgtaaatttttaacctatgttacaccatcttcagtgccagtcttgggcaaaattgtgcaagaggtgaagtttatatttgaatatccattctcgttttaggactcttcttccatattagtgtcatcttgcctccctaccttccacatgccccatgacttgatgcagttttaatacttgtaattcccctaaccataagatttactgctgctgtggatatctccatgaagttttcccactgagtcacatcagaaatgccctacatcttatttcctcagggctcaagagaatctgacagataccataaagggatttgacctaatcactaattttcaggtggtggctgatgctttgaacatctctttgctgcccaatccattagcgacagtaggatttttcaaacctggtatgaatagacagaaccctatccagtggaaggagaatttaataaagatagtgctgaaagaattccttaggtaatctataactaggactactcctggtaacagtaatacattccattgttttagtaaccagaaatcttcatgcaatgaaaaatactttaattcatgaagcttactttttttttttggtgtcagagtctcgctcttgtcacccaggctggaatgcagtggcgccatctcagctcactgcaacctccatctcccaggttcaagcgattctcgtgcctcggcctcctgagtagctgggattacaggcgtgtgccactacactcaactaatttttgtatttttaggagagacggggtttcaccctgttggccaggctggtctcgaactcctgacctcaagtgattcacccaccttggcctcataaacctgttttgcagaactcatttattcagcaaatatttattgagtgcctaccagatgccagtcaccgcacaaggcactgggtatatggtatccccaaacaagagacataatcccggtccttaggtagtgctagtgtggtctgtaatatcttactaaggcctttggtatacgacccagagataacacgatgcgtattttagttttgcaaagaaggggtttggtctctgtgccagctctataattgttttgctacgattccactgaaactcttcgatcaagctactttatgtaaatcacttcattgttttaaaggaataaacttgattatattgtttttttatttggcataactgtgattcttttaggacaattactgtacacattaaggtgtatgtcagatattcatattgacccaaatgtgtaatattccagttttctctgcataagtaattaaaatatacttaaaaattaatagttttatctgggtacaaataaacaggtgcctgaactagttcacagacaaggaaacttctatgtaaaaatcactatgatttctgaattgctatgtgaaactacagatctttggaacactgtttaggtagggtgttaagacttacacagtacctcgtttctacacagagaaagaaatggccatacttcaggaactgcagtgcttatgaggggatatttaggcctcttgaatttttgatgtagatgggcatttttttaaggtagtggttaattacctttatgtgaactttgaatggtttaacaaaagatttgtttttgtagagattttaaagggggagaattctagaaataaatgttacctaattattacagccttaaagacaaaaatccttgttgaagtttttttaaaaaaagctaaattacatagacttaggcattaacatgtttgtggaagaatatagcagacgtatattgtatcatttgagtgaatgttcccaagtaggcattctaggctctatttaactgagtcacactgcataggaatttagaacctaacttttataggttatcaaaactgttgtcaccattgcacaattttgtcctaatatatacatagaaactttgtggggcatgttaagttacagtttgcacaagttcatctcatttgtattccattgattttttttttcttctaaacattttttcttcaaacagtatataactttttttaggggatttttttttagacagcaaaaactatctgaagatttccatttgtcaaaaagtaatgatttcttgataattgtgtagtaatgttttttagaacccagcagttaccttaaagctgaatttatatttagtaacttctgtgttaatactggatagcatgaattctgcattgagaaactgaatagctgtcataaaatgaaactttctttctaaagaaagatactcacatgagttcttgaagaatagtcataactagattaagatctgtgttttagtttaatagtttgaagtgcctgtttgggataatgataggtaatttagatgaatttaggggaaaaaaaagttatctgcagatatgttgagggcccatctctccccccacacccccacagagctaactgggttacagtgttttatccgaaagtttccaattccactgtcttgtgttttcatgttgaaaatacttttgcatttttcctttgagtgccaatttcttactagtactatttcttaatgtaacatgtttacctggaatgtattttaactatttttgtatagtgtaaactgaaacatgcacattttgtacattgtgctttcttttgtgggacatatgcagtgtgatccagttgttttccatcatttggttgcgctgacctaggaatgttggtcatatcaaacattaaaaatgaccactcttttaattgaaattaacttttaaatgtttataggagtatgtgctgtgaagtgatctaaaatttgtaatatttttgtcatgaactgtactactcctaattattgtaatgtaataaaaatagttacagtgacaaaaaaaaaaaaaaa

SEQ ID NO: 14813 - DNA, 2344 bp, Homo sapiens
ctgtcatcgttccgtgggccctgctgcgggcacgctctcggcgcatgcgttttttatgcgggattaagcttgctgctgcgtgacagcggagggctaggaaaaggcgcagtggggcccggagctgtcacccctgactcgacgcagcttccgttctcctggtgacgtcgcctacaggaaccgccccagtggtcagctgccgcgctgttgctaggcaacagcgtgcgagctcagatcagcgtggggtggaggagaagtggagtttggaagttcaggggcacaggggcacaggcccacgactgcagcgggatggaccagtactgcatcctgggccgcatcggggagggcgcccacggcatcgtcttcaaggccaagcacgtggagccgagggtgggctggcagtgtctgccttctatcctgcagactggcgagatagttgccctcaagaaggtggccctaaggcggttggaggacggcttccctaaccaggccctgcgggagattaaggctctgcaggagatggaggacaatcagtatgtggtacaactgaaggctgtgttcccacacggtggaggctttgtgctggcctttgagttcatgctgtcggatctggccgaggtggtgcgccatgcccagaggccactagcccaggcacaggtcaagagctacctgcagatgctgctcaagggtgtcgccttctgccatgccaacaacattgtacatcgggacctgaaacctgccaacctgctcatcagcgcctcaggccagctcaagatagcggactttggcctggctcgagtcttttccccagacggcagccgcctctacacacaccaggtggccaccaggtctgtgggctgcatcatgggggagctgttgaatgggtccccccttttcccgggcaagaacgatattgaacagctttgctatgtgcttcgcatcttgggcaccccaaaccctcaagtctggccggagctcactgagctgccggactacaacaagatctcctttaaggagcaggtgcccatgcccctggaggaggtgctgcctgacgtctctccccaggcattggatctgctgggtcaattccttctctaccctcctcaccagcgcatcgcagcttccaaggctctcctccatcagtacttcttcacagctcccctgcctgcccatccatctgagctgccgattcctcagcgtctagggggacctgcccccaaggcccatccagggcccccccacatccatgacttccacgtggaccggcctcttgaggagtcgctgttgaacccagagctgattcggcccttcatcctggaggggtgagaagttggccctggtcccgtctgcctgctcctcaggaccactcagtccacctgttcctctgccacctgcctggcttcaccctccaaggcctccccatggccacagtgggcccacaccacaccctgccccttagcccttgcgagggttggtctcgaggcagaggtcatgttcccagccaagagtatgagaacatccagtcgagcagaggagattcatggcctgtgctcggtgagccttaccttctgtgtgctactgacgtacccatcaggacagtgagctctgctgccagtcaaggcctgcatatgcagaatgacgatgcctgccttggtgctgcttccccgagtgctgcctcctggtcaaggagaagtgcagagagtaaggtgtccttatgttggaaactcaagtggaaggaagatttggtttggttttattctcagagccattaaacactagttcagtatgtgagatatagattctaaaaacctcaggtggctctgccttatgtctgttcctccttcatttctctcaagggaaatggctaaggtggcattgtctcatggctctcgtttttggggtcatggggagggtagcaccaggcatagccacttttgccctgagggactcctgtgtacttcacatcactgagcactcatttagaagtgagggagacagaagtctaggcccagggatggctccagttggggatccagcaggagaccctctgcacatgaggctggtttaccaacatctactccctcaggatgagcgtgagccagaagcagctgtgtatttaaggaaacaagcgttcctggaattaatttataaatttaataaatcccaatataatcccagctagtgctttttccttattataatttgataaggtgattataaaagatacatggaaggaagtggaaccagatgcagaagaggaaatgatggaaggacttacggtatcagataccaatatttaaaagtttgtataataataaagagtatgattgtggttcaaggataaaaa

SEQ ID NO: 14814 - DNA, 2305 bp, Homo sapiens
ctgtcatcgttccgtgggccctgctgcgggcacgctctcggcgcatgcgttttttatgcgggattaagcttgctgctgcgtgacagcggagggctaggaaaaggcgcagtggggcccggagctgtcacccctgactcgacgcagcttccgttctcctggtgacgtcgcctacaggaaccgccccagtggtcagctgccgcgctgttgctaggcaacagcgtgcgagctcagatcagcgtggggtggaggagaagtggagtttggaagttcaggggcacaggggcacaggcccacgactgcagcgggatggaccagtactgcatcctgggccgcatcggggagggcgcccacggcatcgtcttcaaggccaagcacgtggagactggcgagatagttgccctcaagaaggtggccctaaggcggttggaggacggcttccctaaccaggccctgcgggagattaaggctctgcaggagatggaggacaatcagtatgtggtacaactgaaggctgtgttcccacacggtggaggctttgtgctggcctttgagttcatgctgtcggatctggccgaggtggtgcgccatgcccagaggccactagcccaggcacaggtcaagagctacctgcagatgctgctcaagggtgtcgccttctgccatgccaacaacattgtacatcgggacctgaaacctgccaacctgctcatcagcgcctcaggccagctcaagatagcggactttggcctggctcgagtcttttccccagacggcagccgcctctacacacaccaggtggccaccaggtctgtgggctgcatcatgggggagctgttgaatgggtccccccttttcccgggcaagaacgatattgaacagctttgctatgtgcttcgcatcttgggcaccccaaaccctcaagtctggccggagctcactgagctgccggactacaacaagatctcctttaaggagcaggtgcccatgcccctggaggaggtgctgcctgacgtctctccccaggcattggatctgctgggtcaattccttctctaccctcctcaccagcgcatcgcagcttccaaggctctcctccatcagtacttcttcacagctcccctgcctgcccatccatctgagctgccgattcctcagcgtctagggggacctgcccccaaggcccatccagggcccccccacatccatgacttccacgtggaccggcctcttgaggagtcgctgttgaacccagagctgattcggcccttcatcctggaggggtgagaagttggccctggtcccgtctgcctgctcctcaggaccactcagtccacctgttcctctgccacctgcctggcttcaccctccaaggcctccccatggccacagtgggcccacaccacaccctgccccttagcccttgcgagggttggtctcgaggcagaggtcatgttcccagccaagagtatgagaacatccagtcgagcagaggagattcatggcctgtgctcggtgagccttaccttctgtgtgctactgacgtacccatcaggacagtgagctctgctgccagtcaaggcctgcatatgcagaatgacgatgcctgccttggtgctgcttccccgagtgctgcctcctggtcaaggagaagtgcagagagtaaggtgtccttatgttggaaactcaagtggaaggaagatttggtttggttttattctcagagccattaaacactagttcagtatgtgagatatagattctaaaaacctcaggtggctctgccttatgtctgttcctccttcatttctctcaagggaaatggctaaggtggcattgtctcatggctctcgtttttggggtcatggggagggtagcaccaggcatagccacttttgccctgagggactcctgtgtacttcacatcactgagcactcatttagaagtgagggagacagaagtctaggcccagggatggctccagttggggatccagcaggagaccctctgcacatgaggctggtttaccaacatctactccctcaggatgagcgtgagccagaagcagctgtgtatttaaggaaacaagcgttcctggaattaatttataaatttaataaatcccaatataatcccagctagtgctttttccttattataatttgataaggtgattataaaagatacatggaaggaagtggaaccagatgcagaagaggaaatgatggaaggacttacggtatcagataccaatatttaaaagtttgtataataataaagagtatgattgtggttcaaggataaaaa

SEQ ID NO: 14815 - DNA, 1826 bp, Homo sapiens
ggtagacgcgatctgttcgctactaccggcctcccctggctgttaaaagcagatggtggctgaggtttgttcaatgcccactgcctctactgtgaagaagccatttgatctcaggagcaagatgggcaagtggtgccaccaccgcttcccctgctgcagggggagcggcaagagcaacatgggcacttctggagaccacgacgactcctttatgaagatgctcaggagcaagatgggcaagtgttgccgccactgcttcccctgctgcagggggagcggcacgagcaacgtgggcacttctggagaccatgaaaactcctttatgaagatgctcaggagcaagatgggcaagtggtgctgtcactgcttcccctgctgcagggggagcagcaagagcaacgtgggcgcttggggagactacgaccacagcgccttcatggagccgaggtaccacgtccgtcgagaagatctggacaagctccacagagctgcctggtggggtaaagtccccagaaaggatctcatcgtcatgctcagggacactgacatgaacaagagggacaaggaaaagaggactgctctacatttggcctctgccaatggaaattcagaagtagtacaactcctgctggacagacgatgtcaacttaatgtccttgacaacaaaaaaaggacagctctgataaaggccatacaatgccaggaagatgaatgtgtgttaatgttgctggaacatggcgctgatcgaaatattccagatgagtatggaaataccgctctacactatgctatctacaatgaagataaattaatggccaaagcactgctcttatatggtgctgatattgaatcaaaaaacaagtgtggcctcacaccacttttgcttggcgtacatgaacaaaaacagcaagtggtgaaatttttaatcaagaaaaaagctaatttaaatgtacttgatagatatggaagaactgccctcatacttgctgtatgttgtggatcagcaagtatagtcaatcttctacttgagcaaaatgttgatgtatcttctcaagatctatctggacagacggccagagagtatgctgtttctagtcatcatcatgtaatttgtgaattactttctgactataaagaaaaacagatgctaaaaatctcttctgaaaacagcaatccagaacaagacttaaagctgacatcagaggaagagtcacaaaggcttaaagtcagtgaaaatagccagccagagaaaatgtctcaagaaccagaaataaataaggactgtgatagagaggttgaagaagaaataaagaagcatggaagtaatcctgtgggattaccagaaaacctgactaatggtgccagtgctggcaatggtgatgatggattaattccacaaaggaggagcagaaaacctgaaaatcagcaatttcctgacactgagaatgaagagtatcacagtgacgaacaaaatgatacccggaaacaactttctgaagaacagaacactggaatatcacaagatgagattctgactaataaacaaaagcagatagaagtggctgaacagaaaatgaattctgagctttctcttagtcataagaaagaagaagatctcttgcgtgaaaacagcgtgttgcaggaagaaattgccgtgctaagactggaactagatgaaacaaaacatcagaaccagctaagggaaaataaaattttggaggaaattgaaagtgtgaaagaaaagactgataaacttctaagggctatgcaattgaatgaagaagcattaacgaaaaccaatatttaagtacagtggacagcttagg

SEQ ID NO: 14816 - DNA, 2932 bp, Homo sapiens
ggctggctgcggcggccggggaggccggggaggccgcggcgcggtcactgcgagccgagccgagccgcgccgagccgcgccgatcgccatccggcctcggcactcgcgcgcgatcccggccggcggcgcggcccggcgggccaggcggcgccacagcccatggagctcgagaacatcgtagcgaacacggtgctactcaaggcccgggaaggtggcggtggaaatcgcaaaggcaaaagcaagaaatggcggcagatgctccagttccctcacatcagccagtgcgaagagctgcggctcagcctcgagcgtgactatcacagcctgtgcgagcggcagcccattgggcgcctgctgttccgagagttctgtgccacgaggccggagctgagccgctgcgtcgccttcctggatggggtggccgagtatgaagtgaccccggatgacaagcggaaggcatgtgggcggcagctaacgcagaattttctgagccacacgggtcctgacctcatccctgaggtcccccggcagctggtgacgaactgcacccagcggctggagcagggtccctgcaaagaccttttccaggaactcacccggctgacccacgagtacctgagcgtggccccttttgccgactacctcgacagcatctacttcaaccgtttcctgcagtggaagtggctggaaaggcagccagtgaccaaaaacaccttcaggcaataccgagtcctgggcaaaggtggctttggggaggtgtgcgcctgccaggtgcgggccacaggtaagatgtatgcctgcaagaagctagagaaaaagcggatcaagaagcggaaaggggaggccatggcgctgaacgagaagcagatcctggagaaagtgaacagtaggtttgtagtgagcttggcctacgcctatgagaccaaggacgcgctgtgcctggtgctgacactgatgaacgggggcgacctcaagttccacatctaccacatgggccaggctggcttccccgaagcgcgggccgtcttctacgccgccgagatctgctgtggcctggaggacctgcaccgggagcgcatcgtgtacagggacctgaagcccgagaacatcttgctggatgaccacggccacatccgcatctctgacctgggactagctgtgcatgtgcccgagggccagaccatcaaagggcgtgtgggcaccgtgggttacatggctccggaggtggtgaagaatgaacggtacacgttcagccctgactggtgggcgctcggctgcctcctgtacgagatgatcgcaggccagtcgcccttccagcagaggaagaagaagatcaagcgggaggaggtggagcggctggtgaaggaggtccccgaggagtattccgagcgcttttccccgcaggcccgctcactttgctcacagctcctctgcaaggaccctgccgaacgcctggggtgtcgtgggggcagtgcccgcgaggtgaaggagcaccccctctttaagaagctgaacttcaagcggctgggagctggcatgctggagccgcccttcaagcctgacccccaggccatttactgcaaggatgttctggacattgaacagttctctacggtcaagggcgtggagctggagcctaccgaccaggacttctaccagaagtttgccacaggcagtgtgcccatcccctggcagaacgagatggtggagaccgagtgcttccaagagctgaatgtctttgggctggatggctcagttcccccagacctggactggaagggccagccacctgcacctcctaaaaagggactgctgcagagactcttcagtcgccaaaggattgctgtggaaactgcagcgacagcgaggaagagctccccacccgcctctagcccccagcccgaggcccccaccagcagttggcggtagcagctactccgagcgccgtttacagttttgcacagtgatcttccccattgtccactcaagtcgtggcctggggaacacagacggagctgtccccagtgtcctccgtccctcagcccctggcctggctgagtttggcagggcctgggccatccctgggacaaaggtgcgtcccttcagctcttctccgtggagctcggggctttctgtatttatgtatttgtacgaatgtatatagcgaccagagcattcttaattcccgccgcagacctggcgcccccgccttggctcctgggggcagccagccctggctgggagagcgggagctggcagaggagccactgccaaactcaaggctcctctggcccagcttggatggctgagggtggtcacacccctgagccttcagcactgtgctggccaccccggcctctgagtaagactcgtgcctccccctgctgccctgggctcaggctgctaccctctggggcccaaagctgtcccttctcagtgcttgtcagcgctgggtctggggcctctgtatgccctaggcctgtgccaaagtggccagagattgggctgcctgtgatacccatcagcccactgccccggccggcccagataggtctgcctctgccttccagctcccacagcctggtccctgatactgggctctgtcctgcagacacctctttcagaaacgcccaagcccagcccctaggagggggtggggcatccctggtcaaccctcaaacattccggactcccctcataacaatagacacatgtgcccagcaataatccgccccttcctgtgtgcgcctgtggggtgcgtgcgcgcgcgtgtgtacctgtgtgggtgaaggggatagggcgaggctgtgcctgtgccccaggtcccagccctggcccttcccagactgtgatggccatcctggtcccagtgttagggtagcatgggattacagggccctgttttttccatatttaaagccaatttttatta

SEQ ID NO: 14817 - DNA, 2867 bp, Homo sapiens
caggggtggcagccaactgcaggtgcccaagaacttggcacttctcagttccatctaaaggggcacatctcccttctgggtgtcacgttttcagccaaacatctaaaagaacttcatcatcaagatgtctgatgatattgactggttacgcagccacaggggtgtgtgcaaggtagatctctacaacccagaaggacagcaagatcaggaccggaaagtgatatgctttgtcgatgtgtccaccctgaatgtagaagataaagattacaaggatgctgctagttccagctcagaaggcaacttaaacctgggaagtctggaagaaaaagagattatcgtgatcaaggacactgagaagaaagaccagtctaagacagagggatctgtatgccttttcaaacaagctccctctgatcctgtaagtgtcctcaactggcttctcagtgatctccagaagtatgccttgggtttccaacatgcactgagcccctcaacctctacctgtaaacataaagtaggagacacagagggcgaatatcacagagcatcctctgagaactgctacagtgtctatgccgatcaagtgaacatagattatttgatgaacagacctcaaaacctacgtctagaaatgacagcagctaaaaacaccaacaataatcaaagtccttcagctcctccagccaaacctcctagcactcagagagcagtcatttcccctgatggagaatgttctatagatgacctttccttctacgtcaaccgactatcttctctggtaatccagatggcccataaggaaatcaaggagaagttggaaggtaaaagcaaatgccttcatcattcaatctgtccatcccctgggaacaaagagagaatcagtccccgaactcctgcgagcaagattgcttctgaaatggcctatgaagctgtggaactgacagctgcagaaatgcgtggcactggagaggagtccagggaaggtggccagaaaagctttctatatagcgaattatccaacaagagcaaaagtggagacaaacagatgtcccagagagagagcaaagaatttgcagattccatcagcaaggggctcatggtttatgcaaatcaggtggcatctgacatgatggtctctctcatgaagaccttgaaagtgcacagctctgggaagccaattccagcatctgtggtcctgaagagggtgttgctaaggcacaccaaggagattgtgtccgatttgattgattcttgcatgaagaacctgcataatattactggggtcctgatgactgactcagactttgtctcagctgtcaagagaaatctgttcaaccagtggaaacaaaatgctacagacatcatggaggccatgctgaagcgcttggtcagtgcccttataggtgaggagaaggagactaagtctcagagtctgtcatatgcatctttaaaagctgggtcccatgatcccaaatgcaggaatcagagtcttgaattctccaccatgaaagctgaaatgaaagagagggacaaaggcaaaatgaaatcagacccatgcaagtcactgactagtgctgagaaagtcggtgaacacattctcaaagagggcctaaccatctggaaccaaaagcaaggaaactcatgcaaggtggctaccaaagcatgcagcaataaagatgagaaaggagaaaagatcaatgcttccacagattcactggccaaggacctgattgtctctgcccttaagctgatccagtaccatctgacccagcagactaagggcaaagatacatgtgaagaagactgtcctggttccaccatgggctatatggctcagagtactcaatatgaaaagtgtggaggtggccaaagtgccaaagcactttcagtgaaacaactagaatctcacagagcccctggaccatccacctgtcaaaaggagaaccaacacctggactcccagaaaatggatatgtcaaacatcgttctaatgctgattcagaaactgcttaatgagaaccccttcaaatgtgaggatccatgcgaaggtgagaacaagtgttctgagcccagggcaagcaaagcagcttccatgtccaacagatctgacaaagcggaagaacaatgccaggagcatcaagaacttgactgtaccagtgggatgaagcaagcgaacgggcaatttatagataaactagtagaatctgtgatgaagctctgccttatcatggctaagtatagcaacgatggggcagcccttgctgagttggaagaacaagcagcctcggcaaataagcccaatttcaggggcaccagatgcattcacagtggtgcaatgccacagaactatcaagactctcttggacatgaagtaattgtcaataatcagtgctctacaaatagcttgcagaagcagctccaggctgtcctgcagtggattgcagcctcccagtttaacgtgcccatgctctacttcatgggagataaggatggacaactggaaaagcttcctcaggtttcagctaaagcagcagagaaggggtacagtgtaggaggtcttcttcaagaggtcatgaagtttgccaaggaacggcaaccagatgaagctgtgggaaaggtggccaggaaacagttgctggactggctgctcgctaacctgtgagctgatccttgactcctcttcatcttagcccccctagcagcattccatcccagccagagcacccccaccatcaggccagtcaactgcacaatacacaactgtatttcccaatacacttgagcagttgcctgtgaatgtaagaggtgtcaacaaactgggaaataaaataaaaaaaaataataaaaaaaaaaaaaaaaaaaaaaaa

SEQ ID NO: 14818 - DNA, 1416 bp, Homo sapiens
attcggcaccgcagcgtaggtgctaccaccgctgccgtcgccgccgccattttgatggcaggaagagtccggttctgggacagctggagacagtggtggtgactgaaataactttaccaaaggaaagctattttgcgaactatcttctccagcggagatggccaatgtgctttgtaacagagccagactggtttcctatctcccaggattttgctctttagttaaaagggttgtcaatcccaaagccttttcgactgcaggatcatcaggttcggatgagtctcatgtggctgctgcacctccagatatatgctctcgaacagtgtggcctgatgaaactatgggaccctttggacctcaagatcagaggttccagcttcctgggaacataggttttgattgtcacctcaatgggactgcttcacagaagaaaagcctggttcataaaactttgcctgatgttctagcagaacctttatcaagtgaaagacatgagtttgtgatggcacaatatgtgaatgaatttcagggtaatgatgcacctgttgaacaagaaattaacagtgcagaaacttactttgaaagtgccagagtagagtgtgcaatacaaacatgtccagaattgctgcgaaaagattttgaatcactgtttccagaagtagctaatggcaaactaatgattctgactgtaacacaaaaaactaagaatgatatgactgtttggagtgaagaagtagaaattgaaagagaagtgctcttagaaaagttcatcaatggtgctaaggaaatttgctatgctcttcgagctgagggttattgggctgactttattgacccatcatctggtttggcattttttggaccatatacaaacaacactctttttgaaactgatgaacgctaccgacatttaggattctctgttgatgaccttggatgctgtaaagtgattcgtcatagtctctggggtacccatgtagttgtagggagtatcttcactaatgcaacaccagacagccatattatgaagaaattaagtggaaattagcagaaatatccattcatttgctgtactatttgtatgtaatatttgggttgatctataaacactgtcagactaaagtttttaaaatatacttatttctaagtatttatttcagcatttatgaatttgcaacattggcaagtgatttgggattttaaaattgcaaatgttcatttattcatatcattgaatacacgttgaacacatccacattgtataggatgtggtaattagcttgtaaccagggtatgatctgctattgttatttctcctctttattggaaaaaggcctcagttttaattattttcttcccaaaataaatcacacatttggttacaaaaaaaaaaaaaaaaaaaaaaaaaaaaaaaaa

SEQ ID NO: 14819 - DNA, 2695 bp, Homo sapiens
caaataaaagcgatggcgattgggctgccgcgtttggcgctcggtccggtcgcgtccgacacccggtgggactcagaaggcagtggagccccggcggcggcggcggcggcgcgcgggggcgacgcgcgggaacaacgcgagtcggcgcgcgggacgaagaataatcatgggccagactgggaagaaatctgagaagggaccagtttgttggcggaagcgtgtaaaatcagagtacatgcgactgagacagctcaagaggttcagacgagctgatgaagtaaagagtatgtttagttccaatcgtcagaaaattttggaaagaacggaaatcttaaaccaagaatggaaacagcgaaggatacagcctgtgcacatcctgacttctgtgagctcattgcgcgggactagggagtgttcggtgaccagtgacttggattttccaacacaagtcatcccattaaagactctgaatgcagttgcttcagtacccataatgtattcttggtctcccctacagcagaattttatggtggaagatgaaactgttttacataacattccttatatgggagatgaagttttagatcaggatggtactttcattgaagaactaataaaaaattatgatgggaaagtacacggggatagagaatgtgggtttataaatgatgaaatttttgtggagttggtgaatgcccttggtcaatataatgatgatgacgatgatgatgatggagacgatcctgaagaaagagaagaaaagcagaaagatctggaggatcaccgagatgataaagaaagccgcccacctcggaaatttccttctgataaaatttttgaagccatttcctcaatgtttccagataagggcacagcagaagaactaaaggaaaaatataaagaactcaccgaacagcagctcccaggcgcacttcctcctgaatgtacccccaacatagatggaccaaatgctaaatctgttcagagagagcaaagcttacactcctttcatacgcttttctgtaggcgatgttttaaatatgactgcttcctacatcgtaagtgcaattattcttttcatgcaacacccaacacttataagcggaagaacacagaaacagctctagacaacaaaccttgtggaccacagtgttaccagcatttggagggagcaaaggagtttgctgctgctctcaccgctgagcggataaagaccccaccaaaacgtccaggaggccgcagaagaggacggcttcccaataacagtagcaggcccagcacccccaccattaatgtgctggaatcaaaggatacagacagtgatagggaagcagggactgaaacggggggagagaacaatgataaagaagaagaagagaagaaagatgaaacttcgagctcctctgaagcaaattctcggtgtcaaacaccaataaagatgaagccaaatattgaacctcctgagaatgtggagtggagtggtgctgaagcctcaatgtttagagtcctcattggcacttactatgacaatttctgtgccattgctaggttaattgggaccaaaacatgtagacaggtgtatgagtttagagtcaaagaatctagcatcatagctccagctcccgctgaggatgtggatactcctccaaggaaaaagaagaggaaacaccggttgtgggctgcacactgcagaaagatacagctgaaaaaggacggctcctctaaccatgtttacaactatcaaccctgtgatcatccacggcagccttgtgacagttcgtgcccttgtgtgatagcacaaaatttttgtgaaaagttttgtcaatgtagttcagagtgtcaaaaccgctttccgggatgccgctgcaaagcacagtgcaacaccaagcagtgcccgtgctacctggctgtccgagagtgtgaccctgacctctgtcttacttgtggagccgctgaccattgggacagtaaaaatgtgtcctgcaagaactgcagtattcagcggggctccaaaaagcatctattgctggcaccatctgacgtggcaggctgggggatttttatcaaagatcctgtgcagaaaaatgaattcatctcagaatactgtggagagattatttctcaagatgaagctgacagaagagggaaagtgtatgataaatacatgtgcagctttctgttcaacttgaacaatgattttgtggtggatgcaacccgcaagggtaacaaaattcgttttgcaaatcattcggtaaatccaaactgctatgcaaaagttatgatggttaacggtgatcacaggataggtatttttgccaagagagccatccagactggcgaagagctgttttttgattacagatacagccaggctgatgccctgaagtatgtcggcatcgaaagagaaatggaaatcccttgacatctgctacctcctcccccctcctctgaaacagctgccttagcttcaggaacctcgagtactgtgggcaatttagaaaaagaacatgcagtttgaaattctgaatttgcaaagtactgtaagaataatttatagtaatgagtttaaaaatcaactttttattgccttctcaccagctgcaaagtgttttgtaccagtgaatttttgcaataatgcagtatggtacatttttcaactttgaataaagaatacttgaacttgtcaaaaaaaaaa

SEQ ID NO: 14820 - DNA, 2563 bp, Homo sapiens
caaataaaagcgatggcgattgggctgccgcgtttggcgctcggtccggtcgcgtccgacacccggtgggactcagaaggcagtggagccccggcggcggcggcggcggcgcgcgggggcgacgcgcgggaacaacgcgagtcggcgcgcgggacgaagaataatcatgggccagactgggaagaaatctgagaagggaccagtttgttggcggaagcgtgtaaaatcagagtacatgcgactgagacagctcaagaggttcagacgagctgatgaagtaaagagtatgtttagttccaatcgtcagaaaattttggaaagaacggaaatcttaaaccaagaatggaaacagcgaaggatacagcctgtgcacatcctgacttctgtgagctcattgcgcgggactagggaggtggaagatgaaactgttttacataacattccttatatgggagatgaagttttagatcaggatggtactttcattgaagaactaataaaaaattatgatgggaaagtacacggggatagagaatgtgggtttataaatgatgaaatttttgtggagttggtgaatgcccttggtcaatataatgatgatgacgatgatgatgatggagacgatcctgaagaaagagaagaaaagcagaaagatctggaggatcaccgagatgataaagaaagccgcccacctcggaaatttccttctgataaaatttttgaagccatttcctcaatgtttccagataagggcacagcagaagaactaaaggaaaaatataaagaactcaccgaacagcagctcccaggcgcacttcctcctgaatgtacccccaacatagatggaccaaatgctaaatctgttcagagagagcaaagcttacactcctttcatacgcttttctgtaggcgatgttttaaatatgactgcttcctacatccttttcatgcaacacccaacacttataagcggaagaacacagaaacagctctagacaacaaaccttgtggaccacagtgttaccagcatttggagggagcaaaggagtttgctgctgctctcaccgctgagcggataaagaccccaccaaaacgtccaggaggccgcagaagaggacggcttcccaataacagtagcaggcccagcacccccaccattaatgtgctggaatcaaaggatacagacagtgatagggaagcagggactgaaacggggggagagaacaatgataaagaagaagaagagaagaaagatgaaacttcgagctcctctgaagcaaattctcggtgtcaaacaccaataaagatgaagccaaatattgaacctcctgagaatgtggagtggagtggtgctgaagcctcaatgtttagagtcctcattggcacttactatgacaatttctgtgccattgctaggttaattgggaccaaaacatgtagacaggtgtatgagtttagagtcaaagaatctagcatcatagctccagctcccgctgaggatgtggatactcctccaaggaaaaagaagaggaaacaccggttgtgggctgcacactgcagaaagatacagctgaaaaaggacggctcctctaaccatgtttacaactatcaaccctgtgatcatccacggcagccttgtgacagttcgtgcccttgtgtgatagcacaaaatttttgtgaaaagttttgtcaatgtagttcagagtgtcaaaaccgctttccgggatgccgctgcaaagcacagtgcaacaccaagcagtgcccgtgctacctggctgtccgagagtgtgaccctgacctctgtcttacttgtggagccgctgaccattgggacagtaaaaatgtgtcctgcaagaactgcagtattcagcggggctccaaaaagcatctattgctggcaccatctgacgtggcaggctgggggatttttatcaaagatcctgtgcagaaaaatgaattcatctcagaatactgtggagagattatttctcaagatgaagctgacagaagagggaaagtgtatgataaatacatgtgcagctttctgttcaacttgaacaatgattttgtggtggatgcaacccgcaagggtaacaaaattcgttttgcaaatcattcggtaaatccaaactgctatgcaaaagttatgatggttaacggtgatcacaggataggtatttttgccaagagagccatccagactggcgaagagctgttttttgattacagatacagccaggctgatgccctgaagtatgtcggcatcgaaagagaaatggaaatcccttgacatctgctacctcctcccccctcctctgaaacagctgccttagcttcaggaacctcgagtactgtgggcaatttagaaaaagaacatgcagtttgaaattctgaatttgcaaagtactgtaagaataatttatagtaatgagtttaaaaatcaactttttattgccttctcaccagctgcaaagtgttttgtaccagtgaatttttgcaataatgcagtatggtacatttttcaactttgaataaagaatacttgaacttgtcaaaaaaaaaa

SEQ ID NO: 14821 - DNA, 2067 bp, Homo sapiens
gagagccgaccggggccgcggccaaagagctggctgtaatcccgcctcccgccagccatggcccacttgcgctcgcctagcggcttcggagacccggggaagaaggaccagaaggagtcagaggaggagttagaggaggaggaggaggaggaagaggtggaggaggaggaggaagaggtggaggaggaggaggaagaggtggaggaggaggaggaggaggtggtggaggaggagttggtgggggaagagcaggagttggaggcccctgagacgttcagcgaagagtacctctggaaggtcacggacatcggtgactacgacgatgacttcccagacgtgcgcccccgcttagccagcatcgtcagccctagcctgacctctacgttcgtgcccagccagagcgcgaccagcactgaaacgccgagcgcaagcccaccctccagcacctcctcgcataaaagtttccctaaaatatttcagacatttaggaaagacatgtctgaaatgagtatagatagaaatattcatcgcaatttgtctccaggaattccagtatcagtacaaacagaagaaagttggctccaagatttgtctgataaagtgcaatcgaggaagaaagcctctaaagagaaagctgaacctgaatgtctggcatctaagttaagagaaaaatgggtaattaatccagaagagtcgaaactaaatattttatatgagctggagtttaaggaagacttcataacactgttcgagccttctctaagaacgttacccagcatcggaccaccatccattctggcatacaaagaagagagctccaatttaggcattaacttcaaggatgaagaggaggagacatcacccaaatgtgaattttgtggcagcgatctaagagcatttttttctaatgtggatgtttcctctgaaccaaaagggcatgcctcctgttgtattgctttccaaaatctgattgactatatctatgaggagcaaataaaaaccaaaccccctaaagctgaattaattgctattgaccctcatgcagcccatggtagtgaggtcgacagactcaaggcaaaagaaaaagccctgcaaaggaaacaggagcaacgaatggccagacattttgcaataatatcaagggaacagactcatttctctgaagatgattcaaagcgcttaaaaacaatttcttatcaactttctgtggatattccagaaaaacagataattgatgacattgtatttgattttcaactaagaaacagtaacatgtctatcatttgttgtgattctcggatagcatgtggaaaggttgtcaggaatgagctcttagagaagcactacaaacatgggagcaagtttctgacttcatttccagatgggacaacacaaatattctatccatctggaaacctagccatcattcgagtgcccaacaaggtaaatggttttacttgtatagtccaagaagatatgcccactaaccctgctatcctagcagtgctggattcctctggcagaagttcctgctatcatcccaatggaaatgtctgggtatacatcaatatcttgggaggtcaatattcagatcaagccggcaacagaataagggcttggaattggtcaaattccatcacttcctcaccctttgtttcatttaaacctgtctttctggctttgaaccgttatattggagtccgcatcttagaacaagacaagatttctataacttttctagcaatgggccaacaggcaagaatcagtgttggaaccaaagtgaagctaccaaaccctgaggagattccaatcctccgatacgtaagtggagatgaccttcttctgctggccagtttaataaagatccgtcgcctgtttcataaacttgaaggatgtgtgaattttccctcaagccaggtttgggaaaaattaaagcaaccttcctacctttcttcactttctctaaaactaattgccctttgtcacagttctggtataaagcaagatataatgaagacaataagaaatataataaatgaagaaatttaactaaaaaaaaaaaaaaaa

SEQ ID NO: 14822 - DNA, 1032 bp, Homo sapiens
agtgttcggctggggcaggcacgctgtggctggctacttcccttcctcccatcccccttgggccaaacgggatcggtgcttctggtgagacgcctccccatgcacatcactcccaggtgccctagggggcacatttcccacaactcccagagggcaggtttctagaaagtgccaccagtggggaggcgccacaacttcactgccattttgtgaggtgccgccgtctctcctccagcaaggaaacaatgaccgataaaacagagaaggtggctgtagatcctgaaactgtgtttaaacgtcccagggaatgtgacagtccttcgtatcagaaaaggcagaggatggccctgttggcaaggaaacaaggagcaggagacagccttattgcaggctctgccatgtccaaagcaaagaagcttatgacaggacatgctattccacccagccaattggattctcagattgatgacttcactggtttcagcaaagataggatgatgcagaaacctggtagcaatgcacctgtgggaggaaacgttaccagcagtttctctggagatgacctagaatgcagagaaacagcctcctctcccaaaagccaacaagaaattaatgctgatataaaacgtaaattagtgaaggaactccgatgcgttggacaaaaatatgaaaaaatcttcgaaatgcttgaaggagtgcaaggacctactgcagtcaggaaacgattttttgaatccatcatcaaggaagcagcaagatgtatgagacgagactttgttaagcaccttaagaagaaactgaaacgtatgatttgagaatacttgtccctggaggattatcacaccccaaatgcataatctcgttaatgattgaggagagaaaaggatcagattgctgttttctacaatggagcaggatattgctgaagtctcctggcatatgttaccgaatcaactggccttccagaggctaagaaatttctgttagtaaaagatgttctttttcccaaaaaaaaaaaaaaaaaaaaaaaaa

SEQ ID NO: 14823 - DNA, 2442 bp, Homo sapiens
agcctcgcctagctctctgaaagaaagcctgcaacagaagggagagaagcggccccaagtgcagctgaaagcactccttgggagtcagccaagaccctccatccaagcagggctggatccttgcacttggccatgataaggagatgcttccaggtggcagcaagacttggccaccacagaggccttcttgaggccccccgtatcctgcccagactcaaccctgcctcagcatttggatcctccacagactccatgttctcaagattcttgccagagaagacagacttgaaggattatgctcttcccaatgccagctggtgttcggacatgctgagcctgtaccaagaatttctggagaagactaagtctagcggctggatcaagctgccctccttcaagtccaacagagaccacatccggggactcaagctcccatctggactggcagtttcctcagacaaaggtgactgtcgcatcttcaccaggtgcatccaagtggaaggacaaggctttgagtatgtcatctttttccagccaacccagaagaagtcggtctgtcttttccaaccaggctcctacctggaggggcccccagggtttgctcacggcgggtccctggcagccatgatggacgagaccttttctaaaactgccttcctggctggagaggggctgttcacactaagtctcaacatcaggttcaaaaacttgatccccgtggactctctggttgtaatggacgtagaagtggacaagattgaggaccagaagctttacatgtcctgcatcgcccacagcagagaccagcagacagtttatgccaagtcctcaggtgttttccttcagctgcagttggaagaagagtctccccagtaacagtcactgtgcctgcaggagagccactgcctcccctgcctgcctcctgcctcctgcctcccctgcctgcctcctgcctcctgcctcccctgcctgcctcctgcctcctgcctcccctgcctgcctgggacccatcaaagagcagggaggggtcctcaagcagcaattggtgaggcgagggaaaggacccttttctctgagtaaataaagtctcacagtcccattctcggcccagggcctttctgtggttggaaatcaaaatccttccagggcatctcacatacccaccttcccattcagcaccgactgaaaagatttactgagtacccgccaggtgtcaggcactgtgtgaggcaccaggcacccagaagtgaaggacagggccccggtctcaagatgcacaatgcgggagccaggtgccaagtcagagtgccctatcacgctcctcccacacccaccctggcttccatcatgagtgcagtgtcatctcagcgggaggaagggctaattttactctacaaaagcaatcagaaaacatcttctagaagaagctcttcctgaactgtctcaaaagttaagtggtgttcattaggcaggcaggggagaggaggatatcccaggcagaagggaagtaagaagtaagacaaaggtgcagaggtgtgaaagtgtacagggactttggagaagagcaaggtgttgaggagggcaggcgtttagggaaagagaaggtgggcaggagcaaaccacaggaaggcttcataatccctgctggagagctggaactttgtcttgcaggcaacagggagcctccaaagggcttgggctggggagtgacagagctttgttatttagaaagatgactcagtggcagtaaggcgtcagcaagactgaaggcaggagtactagttaggagatccccacaggctttacactagagacagtaagggcctgcaggggtcagagctgcgaagctgagagatatgagaaaatgttacaaatacaggaagtgcaggactgtgccactagttatacaatgtggatctgtgaagacgagctccaagtttctggcttatgagtttccaggtggttatcactggaaatacagaaagaggtgggggtaaacaatgagctcagttttacatgcatcgagcttgaagtgcccatggaacttgtaccatgtggcaagtgccagcaggaacgtggatattgtgatatggagcttggagagataagctactgactcaaatcgtgagccaatataaaatgtgacatgaggccggacacggtggctcatgcctgtaatcccagcactttgggaggccgatgcgggctgatcacttgagcgattcgagagtcgagaggctggtcgggagttcgagaccagcctgaccaacatggagaaaccctatctctactaaaaacacaaaaaattagccgggtgtggtggcgcatgcctgtaatcccagcatttggatcctccacttgaacccgagaggcggaggttgcagtgagccgagatcacaccattgcactccagcctgggcaacaagagcaaaactccgtccc

SEQ ID NO: 14824 - DNA, 1319 bp, Homo sapiens
gacgccgccgcttggcgccgtgacgctcagccgggccttgtggagtgcgggtctctgctgcggacgccgggggccggcgcggcgttggccgcccccggcctcgccgagtgcagcgcgcccgaaggccagtgcctgcgctccgtccgcggcccggcgcccagggtgggcggggaggccgccgcgcagtcgccgcacgctacaccgccggcgccgtcgtttcgcgtcgcccgcttccggccaccgcggccgccattttgttcgcgcggaagcgccgcggtagggtgggaacccaagcgggagagccgcgggatttgcggccgccgccatgccgtcgtccccgctgcgggtggcggtggtgtgctcgagcaaccagaaccggagcatggaggcgcacaacatcctcagcaaacggggattcagcgtccgatcctttggaacagggactcacgtgaagcttccaggaccagctcccgacaagcccaatgtttatgatttcaaaaccacatatgaccagatgtacaatgatcttcttaggaaagacaaagaactctatacacagaatgggattttacatatgctggacagaaataagagaatcaagccccggccagaaagattccagaactgcaaagacctgtttgatctgatcctcacttgcgaagagagagtgtatgaccaggtggtggaagatctgaattccagagaacaggagacctgccagcctgtgcacgtggtcaatgtggacatccaggacaaccacgaggaggccaccctgggggcgtttctcatctgtgagctctgccagtgtatccagcacacggaagacatggagaacgagatcgacgagctgctgcaggagttcgaggagaagagtggccgcacctttctgcacaccgtctgcttctactgagcccagcgcccgcatggagccgcctctggagcttcctgttgttcatactttttccttcctgacatttgtttttacttacaggtgttctgctggtgacggtagcattacccaaataaactgtgcatatgaaatgggagaggagatgccaaaacgccagatgaaagcaatcaagtttcttcttttccacttttacttatgagcaggatattgattacaaagtttttcttctttaaccaaaaaggaaagacaacggtttgtgtgcacttcccgacatacctgtgtcttcgtgtgcctgccttccctccctcctccccaccgggccggactgtacagagccctgctgcggcgtgttaggaatgacctggaattgtcaataaacagatgctgctgtcaaaaaaaaaaaaaaaaa

SEQ ID NO: 14825 - DNA, 4146 bp, Homo sapiens
cggtccgttgttcatttgccattcgacctccgccagggcctggtcggacggaaacgctccgccggctttattgtcgcttcgttatgtggcggagccgagcagtttagcgtgcctctcaccctcagcgcctgcgaagccggcggcggcgtcgggactcctcggcgcgcggaggaaggatatctgtgtggaggatcggtgtgtgcgcgcgcggctttaaagagggggcagcggagggtctccccgcactccgctgctcaacttcgaaggcctcgctcgctgcaggctcgctcctcacctctccgccgcccgcccccttctccgcgcgggacgctgcccggagcgcggcggggcgggggtggaggacgagagagcggtcggaggcgtcggcccggcagcggcagcggcagcggacgcgtgcagcagacccgggagcgagcgcgagccgggctgccgggcgagagggcgaggccgagccccgcgagaccggaacgccgggggcgggggcgagacagagggggagccgcggggagcgcgcgggacgcggcccgaggccgtgcgcgagccggggcaccgggcggcggcggcggcggcgcgcgccatgtcgttcagtgaaatgaaccgcaggacgctggcgttccgaggaggcgggttggtcaccgctagcggcggcggctccacgaacaataacgctggcggggaggcctcagcttggcctccgcagccccagccgagacagcccccgccgacagcgccgcccgcgcttcagccgcctaatgggcggggggccgacgaggaagtggaattggagggcctggagccccaagacctggaggcctccgccgggccggccgccggcgccgccgaggaagccaaggagttgctgctcccccaagacgcgggcggccccacctcgcttggcggtggcgcggggggccccctgctagcggaaaggaaccgtcggactctggccttccgaggcggcggcggcgggggtctcggcaacaatggcagtagccgcggccgccccgagacctcggtgtggcccttgaggcatttcaatgggcgagggccggcgactgtggatctggagctggacgcgctggaggggaaggagttgatacaggacggcgcgtccctgagcgacagcaccgaggacgaggaggagggggcgagcctgggcgacggcagcggggcggaaggcggcagctgcagcagcagcaggcggtcgggcggcgatggcggggacgaagtggagggcagcggtgtgggagctggcgaaggagagactgtccagcacttcccgctcgcgcggcccaagtctctaatgcagaagctccaatgctccttccagacctcctggctcaaggactttccctggctgcgctattccaaggatactggtcttatgtcttgcggctggtgccaaaagacccctgcagatgggggaagcgtggaccttcccccagtggggcatgatgagctttcgcgagggacccgcaactacaagaaaaccctcctcctgaggcaccacgtctctaccgagcacaaactccacgaagccaacgccccagagtcagaaataccatcagaggaggggtactgggactttaataggaggccaaatgagaactcttattgctatcaacttctgcgacaactaaatgaacagagaaagaaaggtattctttgtgatgtcagcattgtggtaagcggaaaaatcttcaaagctcataagaacatcctggttgcaggcagccgtttctttaagactttatattgcttttcaaacaaagaaagccctaaccaaaacaatactacccacttagatattgctgcagttcaaggtttttcagtcatcttggacttcttgtattctggtaacctggtgctcacaagccaaaatgccattgaagttatgaccgtggccagctatcttcaaatgagtgaagttgttcaaacttgccgaaatttcattaaagatgccttaaatataagcattaaatcagaagctccagagtctgtagttgtggactataataatagaaaaccagttaatagagatggtctgtcttcatcacgggatcaaaaaattgccagtttttgggcaacacggaatcttaccaatttggcaagtaatgtaaagattgaaaatgatggttgtaatgtcgacgagggccaaatagaaaactaccaaatgaatgacagtagttgggtccaggatggatctcctgaaatggctgaaaatgaatctgaaggtcaaacaaaagtgtttatttggaataatatgggctcccagggaattcaagagactggcaaaacaaggaggaaaaaccaaactacaaaaagatttatttataatattccacctaataatgaaacgaatttagaagattgctcagtaatgcagccacctgttgcctatccagaagaaaatacactactcatcaaggaagaaccagatttagatggtgctctactctcggggccagatggtgataggaatgtgaatgcaaatttattggctgaagctggcactagtcaagatggaggtgatgctggtacttcacatgatttcaagtatggtttgatgcctggtccttcaaatgatttcaagtatggattattgccagaatcttggccaaaacaagaaacctgggaaaatggtgaatcatctctaatcatgaacaagttaaaatgccctcattgtagctatgtagccaaatacagacgaacactaaaaaggcacttgctcattcacacaggagtgagatcatttagctgtgatatttgtggaaaactgtttactcgaagagaacatgtaaaaagacattccctggtgcataaaaaggataaaaaatacaaatgtatggtgtgtaagaagatcttcatgttagcagccagtgttggaataagacatggatctcgacgttatggtgtttgtgtagactgtgcagataaatcacagccaggagggcaagaaggtgtagatcagggacaggatacagaattccctcgggatgaagaatacgaggagaatgaagtaggagaagctgatgaagagctagttgatgatggagaagatcagaatgatccctctcgatgggatgaatcaggagaagtttgtatgtctctagatgattaactgacctactatactcctcaaggatgctgcatttggacctaatatgaatcgacaatttggattgttgaacttgaaggcttgcaaaatatggtacatgctggatagtagttatgttgctgtgaaaactgtagggtcaaagccttatagcaaaaaaaatttttttttatatttgcacaggactatacagcaaacaaccatgtggttggattacatggagtccccacatactcagtcagttatcaaagtaaaatattttttatttataggatatacagtaactatttgggtcctatgaaaatagtccttaaagagcttacattcatgtgctactttaacatgaatggagaaaatccgtttatggaagtacagtgacaattgacccaatcactctgtccatcaaaccactcaggctagtttgtactagtagagttttgtttctatttttatttttattaattttattttttttaatacagattttcagtgaggggctttttcaatcccattggttctattttcttgtatttttccatttaatttgcttcataacttaaaccaagtctcttctagtcttaggtattatttctcgattttgtgctgatgggcatgtttataagaactggagaggtaatttattggaatgaactaactgacttcctccattcccctcttcctttttgacatgaattttactacttcacaaatgaagaatgatgttatgaagttagcttggcggagttgacaaataccactaaaatgattatgatttagaagtaactttcttctgctgctctaatctgataaatggttactatatgatattttctgacatggtatttggttttgggtatctgttactttggcactattcttgtttgcctctttatttttgccagtgtactatacctcagtcctatttgaaagacctaattgaaagaaaaatcatagaaataagtaaaatgatttgttttataatttatccaccatgtccagtttggttagct

SEQ ID NO: 14826 - DNA, 3918 bp, Homo sapiens
ctctcccttctccactctctccccctgtctcctttcttcttcttctttcaccctccgtctctcacaccccctccattcccctgtctcctttctgacactgcactgcagctgctcctcagccctgccccctccccagtgagaacaaaccagcaacattgctttttttcctaaagagatttatattgatccgattaaaaaaaaaaaaccttaagaaaccccaaacgcaaaaaaaaaaaaaaaaaaaaaagaaaaaagaaaagaaaaagccaaaacaaaagggagaaccttctcccggtagcagcggcaggaactgcaaacatgatggcggcagctcccatccagcagaacgggacccacactggggttcccatagacctggacccgccggactcgcggaaaaggccgctggaagccccccctgaagccggcagcaccaagaggaccaatacgggcgaagacggccagtattttctaaaggttctcatacctagttatgctgctggatctataattgggaagggaggacagacaattgttcagttgcaaaaagaaactggagccaccatcaagctgtctaagtccaaagatttttacccaggtactactgagcgagtgtgcttgatccagggaacggttgaagcactgaatgcagttcatggattcattgcagaaaaaattcgagaaatgccccaaaatgtggccaagacagaaccagtcagcattctacaaccccagaccaccgttaatccagatcgcatcaaacaaacattgccatcttccccaactaccaccaagtcctctccatctgatcccatgaccacctccagagctaatcaggtaaagattatagttcccaacagcacagcaggtctgataatagggaagggaggtgctactgtgaaggctgtaatggagcagtcaggggcttgggtgcagctttcccagaaacctgatgggatcaacttgcaagagagggttgtcactgtgagtggagaacctgaacaaaaccgaaaagctgttgaacttatcatccagaagatacaagaggatccacaaagtggcagctgtctcaatatcagttatgccaatgtgacaggtccagtggcaaattccaatccaaccggatctccttatgcaaacactgctgaagtgttaccaactgctgcagcagctgcagggctattaggacatgctaaccttgctggcgttgcagcctttccagcagttttatctggcttcacaggcaatgacctggtggccatcacctctgcacttaatacattagccagctatggatataatctcaacactttaggtttaggtctcagtcaagcagcagcaacaggggctttggctgcagcagctgccagtgccaacccagcagcagcagcagccaatttattggccacctatgccagtgaagcctcagccagtggcagcacagctggtggtacggcggggacatttgcattaggtagcctggctgctgctactgctgcaaccaatggatattttggagctgcttctcccctagctgccagtgccattctaggaacagaaaagtccacagatggatccaaggatgtagttgaaatagcagtgccagaaaacttagttggtgcaatacttggcaaaggagggaaaacattagtggaataccaggagttgactggtgcaaggatacagatctccaaaaaaggagaattcgtacctggcacaaggaatcggaaggtaaccattactggaacaccagctgcaacacaggctgctcaatatttaattacacaaaggatcacatatgagcaaggagttcgggctgccaatcctcagaaagtgggttgagtgccccagttacacatcagattgttttaacccctcctttaccccattttcaagaaggatgtactgtactttgcagaagtgaagtttttctgttattaatatataattatgcaaatgaatgcgactatgttgacaatgtgtatatgtaaataatatgtgttttaccagatgtttcatagaaagaattttttcttgatctgttttgttctctatactttgcttgtgtatatttgtcagaggtgtttctagtgtaagatttaagcctgccattttaccagcattattgtagtttaatgattgaatgtagacagggatatgcgtatagttttcagtattagttctagataacactaaattaactactgttaggttgagtatggtggggtcagtgacctaaaatggagtgaggccaaagcactgtcctgtaagtcttacttcctgcttagggcacagtgaagtaggaaacaatattttgaaaataagttttaaatttaaaatgatcaaaaagcaatatagttgcataaaagcactgtaaaatatttaaaaggttaaaactgtggaaaattatattggtaagtttacagatcaataaaagcacctgttctccatctgaactagacaatggaaataatgctgcatgctggccatggcccattcttcatcatttgtaagttcaacaaaagttctcacatggagtcccacctcttcagaggtttgtacatttgtttttaagcactgaattcactactgatcccatcgcctggccagtagaacagtcattactccattaacatcctcactgtttagacacataactgtggtacagtgtattggaaattttataaacaaaagtgaaagtgccaacaaattattgatagctgataatgtttcattatctgcaactgcttgataagtatgttgcattttaagagcttataattgtgtataatttgttaacactagaaacctattagtattgtgaatgtagattttactgtgaagctatctgtgatttagctgtttgctcccatgatggagtctttgcagcatggcgctagcagccaatgcagtttctaatactcggtaatttgcatgttttgtggagcatttttatgtcaccaaccagacagtatttcctgcatgcttatttagaagaggcagcttatcttgagaggtagtgttatctacctttgtcaggctttttgacaggtcatttcagagtaagcctttgttcccaagacccaacaactgtcaccctcttctgtacctctcctgagtgccaactgtccaggccatttgacacaccatctgttaacctctgagtttgcccactcaaggccactcataggggcatccatccccaagcacctcctcatgctgtgcatgcagtcttaaattcaatggacaaaaataaaatgctggctacctctggatcatctggctgagcaactgaattacaaaagagaattacttccatctcaacttcaacccattgattacgtccatcctagcaagctaaatggcatcccagctgctcctttctgtgcaaccaattaaagaacaatgagtgtgatgctccatgtctgaatttcgtccagcctctctctgaactgtgatctttgtcctcatgaactttcccttttgttcattgaactatatggactcttcatttcatattgatttactgtgcaatttacttttggacattgagaacttgaaattatttcctgatcccttccccttccactattaataattcatttctgtcaaactgtaagagtagactcatttttttttttttagtttttaacattggactgttatttcatttagagttctctatctctaaatatttatttagagaatgattttaaaagggaatgatatgcttgtttaaatgaaagagaaaagctgtagtaaactgtgttaattggtaatgactatttatcgtcgatactctgtagctgtgtaagttttgacaaatagtgtatctcgtggaatcagtggttagcattgccgctattatatttactcattttatcattataaatgtgcttagttcatcatgtagcatca

SEQ ID NO: 14827 - DNA, 3846 bp, Homo sapiens
ctctcccttctccactctctccccctgtctcctttcttcttcttctttcaccctccgtctctcacaccccctccattcccctgtctcctttctgacactgcactgcagctgctcctcagccctgccccctccccagtgagaacaaaccagcaacattgctttttttcctaaagagatttatattgatccgattaaaaaaaaaaaaccttaagaaaccccaaacgcaaaaaaaaaaaaaaaaaaaaaagaaaaaagaaaagaaaaagccaaaacaaaagggagaaccttctcccggtagcagcggcaggaactgcaaacatgatggcggcagctcccatccagcagaacgggacccacactggggttcccatagacctggacccgccggactcgcggaaaaggccgctggaagccccccctgaagccggcagcaccaagaggaccaatacgggcgaagacggccagtattttctaaaggttctcatacctagttatgctgctggatctataattgggaagggaggacagacaattgttcagttgcaaaaagaaactggagccaccatcaagctgtctaagtccaaagatttttacccaggtactactgagcgagtgtgcttgatccagggaacggttgaagcactgaatgcagttcatggattcattgcagaaaaaattcgagaaatgccccaaaatgtggccaagacagaaccagtcagcattctacaaccccagaccaccgttaatccagatcgcatcaaacaagtaaagattatagttcccaacagcacagcaggtctgataatagggaagggaggtgctactgtgaaggctgtaatggagcagtcaggggcttgggtgcagctttcccagaaacctgatgggatcaacttgcaagagagggttgtcactgtgagtggagaacctgaacaaaaccgaaaagctgttgaacttatcatccagaagatacaagaggatccacaaagtggcagctgtctcaatatcagttatgccaatgtgacaggtccagtggcaaattccaatccaaccggatctccttatgcaaacactgctgaagtgttaccaactgctgcagcagctgcagggctattaggacatgctaaccttgctggcgttgcagcctttccagcagttttatctggcttcacaggcaatgacctggtggccatcacctctgcacttaatacattagccagctatggatataatctcaacactttaggtttaggtctcagtcaagcagcagcaacaggggctttggctgcagcagctgccagtgccaacccagcagcagcagcagccaatttattggccacctatgccagtgaagcctcagccagtggcagcacagctggtggtacggcggggacatttgcattaggtagcctggctgctgctactgctgcaaccaatggatattttggagctgcttctcccctagctgccagtgccattctaggaacagaaaagtccacagatggatccaaggatgtagttgaaatagcagtgccagaaaacttagttggtgcaatacttggcaaaggagggaaaacattagtggaataccaggagttgactggtgcaaggatacagatctccaaaaaaggagaattcgtacctggcacaaggaatcggaaggtaaccattactggaacaccagctgcaacacaggctgctcaatatttaattacacaaaggatcacatatgagcaaggagttcgggctgccaatcctcagaaagtgggttgagtgccccagttacacatcagattgttttaacccctcctttaccccattttcaagaaggatgtactgtactttgcagaagtgaagtttttctgttattaatatataattatgcaaatgaatgcgactatgttgacaatgtgtatatgtaaataatatgtgttttaccagatgtttcatagaaagaattttttcttgatctgttttgttctctatactttgcttgtgtatatttgtcagaggtgtttctagtgtaagatttaagcctgccattttaccagcattattgtagtttaatgattgaatgtagacagggatatgcgtatagttttcagtattagttctagataacactaaattaactactgttaggttgagtatggtggggtcagtgacctaaaatggagtgaggccaaagcactgtcctgtaagtcttacttcctgcttagggcacagtgaagtaggaaacaatattttgaaaataagttttaaatttaaaatgatcaaaaagcaatatagttgcataaaagcactgtaaaatatttaaaaggttaaaactgtggaaaattatattggtaagtttacagatcaataaaagcacctgttctccatctgaactagacaatggaaataatgctgcatgctggccatggcccattcttcatcatttgtaagttcaacaaaagttctcacatggagtcccacctcttcagaggtttgtacatttgtttttaagcactgaattcactactgatcccatcgcctggccagtagaacagtcattactccattaacatcctcactgtttagacacataactgtggtacagtgtattggaaattttataaacaaaagtgaaagtgccaacaaattattgatagctgataatgtttcattatctgcaactgcttgataagtatgttgcattttaagagcttataattgtgtataatttgttaacactagaaacctattagtattgtgaatgtagattttactgtgaagctatctgtgatttagctgtttgctcccatgatggagtctttgcagcatggcgctagcagccaatgcagtttctaatactcggtaatttgcatgttttgtggagcatttttatgtcaccaaccagacagtatttcctgcatgcttatttagaagaggcagcttatcttgagaggtagtgttatctacctttgtcaggctttttgacaggtcatttcagagtaagcctttgttcccaagacccaacaactgtcaccctcttctgtacctctcctgagtgccaactgtccaggccatttgacacaccatctgttaacctctgagtttgcccactcaaggccactcataggggcatccatccccaagcacctcctcatgctgtgcatgcagtcttaaattcaatggacaaaaataaaatgctggctacctctggatcatctggctgagcaactgaattacaaaagagaattacttccatctcaacttcaacccattgattacgtccatcctagcaagctaaatggcatcccagctgctcctttctgtgcaaccaattaaagaacaatgagtgtgatgctccatgtctgaatttcgtccagcctctctctgaactgtgatctttgtcctcatgaactttcccttttgttcattgaactatatggactcttcatttcatattgatttactgtgcaatttacttttggacattgagaacttgaaattatttcctgatcccttccccttccactattaataattcatttctgtcaaactgtaagagtagactcatttttttttttttagtttttaacattggactgttatttcatttagagttctctatctctaaatatttatttagagaatgattttaaaagggaatgatatgcttgtttaaatgaaagagaaaagctgtagtaaactgtgttaattggtaatgactatttatcgtcgatactctgtagctgtgtaagttttgacaaatagtgtatctcgtggaatcagtggttagcattgccgctattatatttactcattttatcattataaatgtgcttagttcatcatgtagcatca

SEQ ID NO: 14828 - DNA, 1210 bp, Homo sapiens
ctctcccttctccactctctccccctgtctcctttcttcttcttctttcaccctccgtctctcacaccccctccattcccctgtctcctttctgacactgcactgcagctgctcctcagccctgccccctccccagtgagaacaaaccagcaacattgctttttttcctaaagagatttatattgatccgattaaaaaaaaaaaaccttaagaaaccccaaacgcaaaaaaaaaaaaaaaaaaaaaagaaaaaagaaaagaaaaagccaaaacaaaagggagaaccttctcccggtagcagcggcaggaactgcaaacatgatggcggcagctcccatccagcagaacgggacccacactggggttcccatagacctggacccgccggactcgcggaaaaggccgctggaagccccccctgaagccggcagcaccaagaggaccaatacgggcgaagacggccagtattttctaaaggttctcatacctagttatgctgctggatctataattgggaagggaggacagacaattgttcagttgcaaaaagaaactggagccaccatcaagctgtctaagtccaaagatttttacccaggtactactgagcgagtgtgcttgatccagggaacggttgaagcactgaatgcagttcatggattcattgcagaaaaaattcgagaaatgccccaaaatgtggccaagacagaaccagtcagcattctacaaccccagaccaccgttaatccagatcgcatcaaacaaacattgccatcttccccaactaccaccaagtcctctccatctgatcccatgaccacctccagagctaatcagaagcataatatctcctggatatcatgaagcaagatataagagaagaacaaaacaaaatccgtaattcattgaaagaattgtaatcatcaatctttcatattattaatactttgtaattattttctccccaacagtattttccagtagattctaatcatgtggtagggcagaaggaaatgtgttttttgttgttcatttgtttcttgtcaatagtcctgattaatttagctttgctatactgacttatatctggaagtatataaccaagataagaaaataggttttaatatgatcatcttaagctaattgtaatgaaaagaactaatggactgtcaatattcagaaaaccaaaaataaaaaatacagaaaacta

SEQ ID NO: 14829 - DNA, 2761 bp, Homo sapiens
cgtatggcctggcccagggtgccgtagctgaggaagaagggaggcttcacagcatccagggcttatatggcctggcccagggcgccatggctgaggaagaagggaggcttcacagcgtccagggcctattgtcacttcaagacttgcagaacgtcaacacgcccctgatgaggaagctggcgcgcctcaagctcggcctcgtggaaatggctctggacatgctccagttcatctgggaggaggcccacgggcagcagagtgagcaggggtccctggagaagctgctggcggactatctgcagaacaccagtgactacacttccgtcggcctgcaatggttcacgctgaagcggactctagcacacggggcactggcacagctggggagcctgcagccgctgagcgtgggctgtgtggagatccgcgcccggctcctgggcctggccgggagggccctgcacctgctggccatgcaagctgaccctgtgcaccctacctgctactgggaggcgggcccctcggtgggcgccaagctgagcggcctcaagtctctggagctggaggtagaggaagagggtgccacaaagtccagcagggacccgccggcctccagggcagccccggaggagcactgcaggagaggcgaggacctgaagaggaggatggttctggcccagcagtacctggctcaggcgtcagaggtgctgctgcagtgcctacaggtggcccttggcagtggcctcctggatgtcgcagcagccgccagcctggagatggtggagtgtgtcggcaccctggaccctgcaactacctgccagttcctggctctgtctcagagctgctcggcctcagagacgatgagggatgtcctgcttgcagccacagccaacaccagcagctcacagctggcggccctgctgcagctacagcaccagctccggtgccaagacaggaccaccaccagcctgggcgcccgtgtggagcagaggctggccgccgtgtccaaggcttggcaaaatctctgcgtcactgagcagcattttaacctcttgaatgagatgcctccgaccttttggatcctctttctgcacctctcaggggacaggtcccgtctgtacggcgctgcctacgagaaacccaagttcattactgcagccaaaggaaaggtgcaggcggtgggaggctcctgcaaggtgatgcgtctggccataagtcccactgccttctcccacctgctggcctgtgcccagcagttccggaagcagacccaggcccaggtgtacagtgaggacatggccctgaacataggctcggaaccagaaggcctgcaggtggaagagaaggagcgccctgtgcagaggctcagtagcgtcctggggcccctggaggagcttctgcagccgctattccccctgctcagcctctccaaggccagagtgcagacacctgcggttgttgccgattcagggaagtcgaagggcaaagacaaggagaggaaaacgtccacaggacaacacagcacagtccagcctgaggttgccgataagatagtcctggtcacagacagacatctcctggagctgccactggaaggtctctctgtgttcgatgaagggacaatttcctctgtgtcacgagaattttctcttcaaatgctgtggaatcgcctccataaagaagagacagaaggtggcgtgaaaaaggagggaagaagcagagaccccaaaaagagaagcctagcgaagaagggcaggaagggcagcatcccccggaccatcccccctgactgcatcatagtcgactcagacaacttcaagttcgtcgtggacccatacgaggaggcccagggcccagaaatgctaactcctgtctccatcacccaagacattttggaaagattccaagacacattcacgtcgcgatgggcgggacatctgggaagcaagcactttcccagccaggcccagtgggagcaggccctgggcagctgcagcggtttcttcttctatggaatggagagcttcctgtcccatatattagtggagagattggtcgccatgaacttgcaagagtgccaggtggcagtcctgctggacctggcgcggtcctaccagagcttgaagaggcacatggagagcgtggagcacaggagatctgttggccgttgggaagccaattggagaaacggtgcgtctccttcagaagatgagtggcgacgaggcggtgaaccaaggcgaggcttctcagaccttgaaggacaagctgctgctgctccaaagctccgagctccttcccaccacgctcaacttggtcctgtatgggctgccgcaccaagccatcgggtagtgcaggcctggacctgcctcccatcagctgctggggccccagcacttgcctctgcccttggctctgcccctctgccaacccatccccacctcccggctcccatccccagctcccagctcgctctccccttcctgggcctctccccagcccttggtgcagcctcagccagggaccctcccccagcgacttcccgcaaggcagccgcctggacctcgagctctgcctgcctgtgtgcgccatggggtctgcgtcggggctggagctgcgtctcttcccggggccaggacaagggcggcctccccttggcggcgctggtgctgagttgcttagaccagaagactattcagaccgtgagcctgtttttgatttgagtgttccactaaacaaacaacaaaagccaaaaaaaaaaaaaaaa

SEQ ID NO: 14830 - DNA, 1479 bp, Homo sapiens
ggaagccattgcctgtttaatagttgctgttgctgcacttccgcttctctcccagcgagagagagacacgagtggccaggcccagccgcagccgcagcagcagccgccgcggcggcacggaggagccagacacaaagagaggggctgtttgcggggtggggtggggggttcgctatgtcggatgacgattcgagggccagcaccagctcctcctcatcttcgtcttccaaccagcaaaccgagaaagaaacaaacacccccaagaagaaggagagtaaagtcagcatgagcaaaaactccaaactcctctccaccagcgccaagagaattcagaaggagctggcggacatcactttagaccctccacctaattgcagtgctggtcccaaaggcgataacatctatgaatggagatcaaccattctagggcctccaggatccgtgtatgagggtggtgtattctttctcgatatcacttttacaccagaatatcccttcaagcctccaaaggttacatttcggacaagaatctatcattgtaatattaacagtcaaggtgttatttgcttggacatattgaaagataattggagtccagcactaaccatttctaaagtcctcctttctatctgctcacttcttacagactgtaatcctgccgaccccttggtgggaagtattgccactcagtatatgaccaacagagcagaacatgacagaatggccagacagtggaccaagagatacgctacataaattggggtttcacaattcttacattatttgtctgtcacagaagagagctgcttatgattttgaaggggtcagggagggtgggagttggtaaagagtagggtatttctataacagatattattcagtcttatttcctaagattttgttgtaacttaaggtatcttgctacagtagacagaattggtaatagcaacttttaaaattgtcattagttctgcaatattagctgaaatgtagtacagaaaagaatgtacatttagacatttgggttcagttgcttgtagtctgtaaatttaaaacagcttaatttggtacaggttacacatatggccatttatgtaaagtccctctaagactacatactttttgtttaaaacaaaattggaatttgttttcccttcttggaagggaacattgatatttaacagagtttttagagattgtcatctcatatatataaaatggacacgtggctataaaacaccatataagagatgagtagtgcgttttattttatatgccaatctactttgtttaaaaaaggtctgaatcaggacttgtgaaaacctgtagtgaaataccttaagctgttaactaactgtaaggcgtggaataggagttgctcagtggattggttctatgttgtggactacttaagtctgcatttgttactgtgctaataaacaatattaaaaaccacctaataaacaaaaaaaaaaaaaa

SEQ ID NO: 14831 - DNA, 1243 bp, Homo sapiens
gcagccaccgtccccacgctggggcttcaggtctcctagcaacaagttgtaccatatgaggacggccgctgagccataatggagatatcaatgcctccacctcagatatatgtagaaaaaactctggccattatcaaaccagatattgttgacaaagaggaggagatacaagatattattcttagatccggattcaccattgttcagagaagaaaactacgcctcagccctgagcaatgtagtaacttttatgtggaaaagtatggaaaaatgtttttccccaacttaacagcttacatgagttctggaccacttgtcgccatgatattagctagacataaagccatctcttattggttagaacttttgggaccaaataatagcttagtagcgaaggagacacatccagacagtctgagggcaatttatggcacagatgacctaaggaatgcacttcatgggagtaatgactttgctgctgcggaaagagaaatacgttttatgtttcctgaagtgattgttgagcccattccaattggacaagctgctaaggactatttaaatttacatataatgccaactctgcttgaaggactcacagagctttgtaagcaaaaaccagcagatcctttgatttggctagctgattggctgctgaaaaataatcctaacaaacccaaactttgtcaccatccaattgtagaagaaccttattaaaaaaaaaatcctcgaaagaacaaatcatgaactatcttattataaaaggctgtacttctactgtttgaaaaaattatttctagggtttaagtaactacaagtaaaataaatttatttcttaaaaataagtgttaaaggaataactattctatgaagcagataacattaaggtaaaatataggcttagagtatgattttaacaatgatgtaacactaggtaatggaaaactcatgtaagatgttgctagatgtttttgtttttcttaagtttgagaagtaagacataaagtttagttatacattttcccaagcacatatcctatatctaaatacataattaatgcacagttgagacagtctagtttaaaaggcttaggtccttttgtagtccataagcatggtgatttggtttcatgctcatgtgtcagatatgcttccctcaaaccttgttacagcatcatcacattacctgtttgatgtaaaaaataaaaaatagaaaggtgtaagtaaaaaaaaaaaaaaaaaa

SEQ ID NO: 14832 - DNA, 2045 bp, Homo sapiens
ctgtggggaaccgaggtgcgggcggcgagcgaggcagccgggtgcttcgcagcggagctcgaggctctgtagcacccagttggacccagtcgcccaggcaccgcccgcgccccgcggccgtctcctgcgcctcccagaggagggagttcgagcatcccccgcggcggccactcctcggggccaggagcggggaagcgaagtgcgagagaccccggaccccagcgctgtctcttcccgccgcccgaaccaccatgacccacttcaacaagggcccttcctatgggctctcggccgaagtcaagaacaagattgcttccaagtatgatcatcaggcagaagaagatcttcgcaattggatagaagaggtgacaggcatgagcattggccccaacttccagctgggcttaaaggatggcatcatcctctgcgaacttataaacaagctacagccaggctcagtgaagaaggtcaacgagtcctcactgaactggcctcagttggagaatattggcaactttattaaagctattcaggcttatggtatgaagccacatgacatattcgaagcaaatgatctttttgagaatggaaacatgacccaggttcagactactctggtggctctagcaggtctggctaaaacaaaaggattccatacaaccattgacattggagttaagtatgcagaaaaacaaacaagacgttttgatgaaggaaaattaaaagctggccaaagtgtaattggtctgcagatgggaaccaacaaatgtgccagccaggcaggtatgacagcttacgggactaggaggcatctttatgatcccaaaatgcaaactgacaaaccttttgaccagaccacaattagtctgcagatgggcactaataaaggagccagccaggcagggatgttagcaccaggtaccagaagagacatctatgatcagaagctaacattacagccggtggacaactcgacaatttccctacagatgggtaccaacaaagttgcttcccagaaaggaatgagtgtgtatgggcttgggcggcaagtatatgatcccaaatactgtgctgctcctacagaacctgtcattcacaacggaagccaaggaacaggaacaaatggttcggaaatcagtgatagtgattatcaggcagaataccctgatgagtatcatggcgagtaccaggatgactaccccagagattaccaatatagcgaccaaggcattgattattagatccacacagaaggagctcagtatttagtcctttgtttttattcagtgagaaccaagctagccttgagtaatttttatcttgtcttcctaaaacactattaagcttattgtacttttaagaaaaattgccttacgtacattcctttttcctttttctgcctcttccctcaatagttgccttttagtgctgtaatagttaaatcctacagcataatcaataactcgcatatgaagtaaaaaggaatactgtgaaaggggagtactcttgtacagccagttcttttatgcaaaaatctatgcatttttacaatcttatattaaactggtattttcaaacaataggaaacttttttttttttttttttttacagtttagtgtatctggtttctacatggaagactaaactcatgcttattgctaaatgtggtctttgccaactaaatttaagatgcagcattttagaaatttacatatcaatgtttctacagtattgtttgctaatttttaaataaagtcatgatcagtgtgcatttgtgattatatgtgtactcattctcttacctagcgaacaagatcttttcagagtggtgtttctaaaagagcatgtacaaaagtggcctgtggacatttaggcctgggtgatgcatttgctcttcctgtttgtgccaatgtatcaatgtagagttgctctgttttcttcaactgtatttattgctgcatttctcagcataaacttatcccattgtattttttataaataaatattttttttgaactttcatatgaaaaaaaaaaaaaaaaaa

SEQ ID NO: 14833 - DNA, 6298 bp, Homo sapiens
ccgcgttctgcctggtgtcggccacctccgtgtggacggcgggggccgagcccatgagtagggaggagaaacagaagcttgggaatcaagtactggaaatgtttgatcatgcttatggtaactatatggaacatgcttaccctgctgatgaactcatgcctttaacctgtagaggtcgagttagaggccaagagccaagtcgcggtgacgttgatgatgccttgggaaaattttctctgacactgattgattctttggacactcttgtggttttaaataaaactaaagaatttgaagatgcagtgagaaaagttttaagagatgttaatttagataacgatgtagtcgtatcagtctttgaaacaaacatcagagttcttgggggtcttttgggtgggcactccctggcaatcatgctgaaagaaaaaggtgaatatatgcagtggtacaatgatgaacttctccaaatggcaaagcagttaggttacaaacttttaccggctttcaacactaccagtggccttccttatccaagaattaatttaaagtttggcatcagaaaaccagaagctcggacaggaactgagacagatacctgtacagcttgtgcaggtaccttgatccttgaatttgctgctttaagtcgattcacaggagcaacaatatttgaggaatatgccagaaaagctcttgattttctctgggaaaaaagacagcgaagtagtaatttagtgggcgtgactataaatattcatactggagattgggtacgaaaagatagtggagttggagcagggattgattcatattatgaatatctgttgaaagcctatgtcttgcttggagatgacagttttctggaaagatttaacacacactatgatgccataatgaggtatattagccagccacctcttctacttgatgtgcatatccacaaaccaatgctgaatgctcggacttggatggatgctttgcttgccttcttcccaggcttgcaggtgttaaagggggatattagacctgctattgaaactcatgaaatgttatatcaggtgattaaaaaacacaattttctaccagaggcatttaccacagatttcagagtacactgggctcaacatcctttaaggccagaatttgcagaaagtacctacttcttatataaagctacaggagatccttactaccttgaagtagggaagacacttattgaaaatttaaataaatatgctagagtgccttgcggatttgctgccatgaaggatgttcgtactggaagtcatgaggacagaatggattctttcttcttggctgaaatgtttaaatatctttacctgttatttgctgataaagaagacattatttttgacatagaagattacatctttacaacagaagctcatctgttacctctttggctctctactacaaatcaaagcatctctaaaaagaacacaacctcggaatatacagaactggatgacagtaacttcgattggacttgtccaaatactcagatcctctttcctaatgacccattgtatgctcaaagtattcgtgagcccttgaaaaatgtggtggataagagctgtcctagaggcatcatcagagtagaggagagtttcaggagtggagctaaaccccctctgagagccagagatttcatggccactaaccctgagcatttagaaatcctgaagaagatgggggtgagtttgattcacctcaaagatgggagagtccagttggtccaacatgcaatccaagctgctagttcaatcgacgctgaagatgggttgaggttcatgcaggagatgattgaattgtcaagtcagcaacaaaaagaacagcagctgcctccacgagctgtacaaattgtttcccacccattttttggcagggtagtattgactgctggaccagctcagtttgggctggatctgtctaaacataaagagacaagaggatttgttgcaagcagtaaaccatccaatggttgttcagagcttactaacccagaggcagtgatgggaaaaatcgcactgatacaaagaggacagtgcatgtttgcagaaaaggcacgcaacatccagaatgctggagccattggtggcattgttattgatgacaatgaggggagcagcagtgatactgcccctctgttccagatggcaggtgatggaaaggatacagatgacatcaagatccccatgctgttcttattcagcaaagaaggaagtatcatactggatgccatccgggaatatgaggaggtagaagtgctcctctctgataaagcaaaagatcgagatcctgaaatggaaaatgaagaacaaccatcctctgaaaatgattctcagaatcagagtggtgaacagatttcatcaagttctcaggaggttgatttggttgatcaagagtcttctgaggaaaattctctaaattctcacccagaatcattatctctagcagatatggacaatgctgcaagcatttccccttctgaacagacttctaatcccacagaaaaccatgagactacaaatcttaatggtgaatgtacagatttagataaccagcttcaagaacaatcagaaactgaggaagattccaatcctaatgttagctggggtaaaaaggtccagcctatagactccatattagcagactggaatgaagatatagaagcatttgaaatgatggagaaggatgagctatgacttgctaaacaatctgttggtaggtatttaaaaagaaaaggtaaactgtgtgtggttaatagacatcctaatactaagcaggctttctaatgggaggctttaagtatggtgatgaacaaccacgttctgactggcgtagttatcgtaggaatctggagcatgctgtgttagaattgaccttgtttaaaactgtcccatcaaaaatggaaatccacagttcccccttcaaatgcagcactgcaccaccctgcaacacctcaggccagggaaagattactgagcattcctgcgaaccagatttctgttgtctctggatagacaagaaacaaaattcatttagtagtggagtggggaataggagtttggatagccttctaattaaaggaagctcgcctttcttggttttgggggttagaggctcttttgggaagatgcatccgagtattgtggcattctgattatgctgccttcacaaaacactctaagtgacctaagtggttatgaagcaaatgcatttatggtgaaaacagtctttgctcattgctttctcttgtttcatttagtgacaaatgatcaagatgacttgattttttttccttcttaacaatgtcttttttatttaaaccaaaggtgaagccagtgtactttctcagtgagttctctgcataaagactaatcagtgggaccaggtaaaaaggtcatataatacattgtggagattgcttacttaatacttctgaaaaatggagtaagggagaaactgtaatgttgcaatatgaacctcccattgggccttccatagggaaagctgtgactactctgaaatggaacctagcattatatccttgtagggtagattataaatcatttccagttcatttctcttagaggtgattacctctagccatcagccttactccatcccatgtttggtatgcaatttgagccacaaggctcgtatcgccaacagctatatacattttgttccatttttctgtcttacagagccatgataaaactgtggttagtgagttaaaattcctggagtaactactgtttttctcctttgaaacttaggtttctaaagttgcacctaaggaatctgtcacattttctgttgaatcatggtttttgtttttgtttttaacagatattccttctgatacggacttgaaaattagtgtatggtgacctgtgtttaaaaaaaaaagtacaatacaactacatatagctatatagcttaatgagacttccacccccccccccttttttttttggtttgttgttgttgtagtagtctggtgctggccacatttaagtcttaaaaatttttaaattttgttgttgatgtttgtacacagccctgttgttgaaatcatggctttattcattttatttattttttaaacttgcctgaatttgttctaaaggaatatttaagagacataattttcttctctttaccataacattacacaaaactttttcctaaaacacggttgtgaggtactgatgaggtgtaagtggagctgttaaaaacagcagtgctgtattgcagttatgtatattcgtgtacagtatgtttagatcccaggtaaacatattcttttctgagaggataaatacctgcattcagatattccaggtaaatataattgagtcagggagtagtaaatctgatggagaattcactttggggaggggaaaaagaatagtatgcaagacccttattggcttttaattatacctgaaaccaaaatggatatttttagtctctctgcatgtgagatttggtgtaacaagatagaactataatatatacagtatatggaaggatagatatagtgctttgttcattttaattgcaaagctgccaaaatagttgaagcttaattacttgacttgccttgatttataggactggggcttggagaaaatgagcagatgttcctctaagacatcgattacagaagccttatatacatggatttgattttgtatttgtagctgaaagtcactgttgtctaaaactaacttttctaagttatcaaaacaacctaatttcttttccaacaaggagaacttaatggcatgaaggattgtgtgacacattggaaaagccagcttactgccactctcttcctttggccattagagggaggtgttgcctttcattgacgcttagaagcaaattgttcacttgttaagaaaagtaaatccttaaaaaaagaaaaggaaaaaatttaaccaatttttcttaatacccagaaggaattatactcaatatttccctagttaagaaaagaggagataatgttcgtctaaaaaactccaacgttgtaattacaactctacattcatttacttacttgacatactgccacaaagtagtttttgagttcattaaaaattccaaaggcattagttgtttttttttttttttagtgttttgttttttagttaacttttatagacattttagtaacttgctaaagattcaggggattctatgaaccccgaatttagaaacatctggtctacctcagttaaatgttgactgcttagaaatatagctgaagtgatcaccacagccataaaattgtttaagaaagatttatataatgtttacaaatctggaatcaaggattttagctgaaatcctttaagagatattagagcaagtatttaattcaggtattttcaagttttaaaacttaacctgtttacctacttaaaaataaaatagctagtttttttctgcatataaaagttcattgaaatgatatgcccttatttgcaatacttttcccataaagttttaagtgtgaaagaattgtaatttactagatatgtttggtatgggatattttgttaggcaagttttcttttttcttcttaaattgcaataggcttccaaaaagagtataattgtttcagaacaaattaactcttggcattatacgtctccctttttctttacagtattagtaaaaagaaaaattgtacactttctgattttaacttcactaatgtaattactctctcaagaagcttttaaaatttaaattaccatcacacaaccttttttatagtaaagccaacatttgttctctcaccaaaccccatgccaaattcatcatgaagaaagctcagcataagtaattcaaatactgcttataattttagaggggggtagaatttagtaaatattccagccggtcgttttatgcacaaggcttcagtcagaacatagaaaaaaaaaacattctgtgaatgaaatattgtatgttcagattttataaaagacatttttaaaagcccaatttacagccgtatattttcttatgatgtaatttatgaaaaagatgtctgtactaacaggtgctgtaacactactgttgttggattttattgtttggtgataaatgtatacaatatttctaagggaaactatgtactgtgatgtaaaagtctgggcaaaatgtatataatcctgtatataattatgtatttgattataattactgattgtaaagatttaataaaatatgtaaatattccaaaaaaaaaaaaaa

SEQ ID NO: 14834 - DNA, 2319 bp, Homo sapiens
gcctccacagatatcaaaagaaacctgaagagcctacaaaaaaaaaagagataaagacaaaattcaagaaaacacacacatacataattgtggtcacctggagcctgggggccggcccagctctctcaggattcagcagacattggaggtggcagtgaaggatacagtggtagtcaatgttatttgagcagggtcagcaggccctggagcttcctgagtgcacaatgcagaaggctgcttactatgaaaacccaggactgtttggaggctatggctacagcaaaactacggacacttacggctacagcaccccccaccagccctacccaccccctgctgctgccagctccctggacactgactatccaggttctgcctgctccatccagagctctgcccctctgagagccccagcccacaaaggagctgaactcaatggcagctgcatgcggccgggcactgggaacagccagggtgggggtggtggcagccagcctcctggtctgaactcagagcagcagccaccacaaccccctcctccaccaccgaccctgcccccatcttcacccaccaatcctggaggtggagtgcctgccaagaagcccaaaggtgggcccaatgcttctagctcctcagccaccatcagcaagcagatcttcccctggatgaaagagtctcgacagaactccaagcagaagaacagctgtgccactgcaggagagagctgcgaggacaagagcccgccaggcccagcatccaagcgggtacgcacggcatacacgagcgcgcagctggtggaattggaaaaggaattccacttcaaccgctacttgtgccggccgcgccgcgtggagatggccaacctgctgaatctcacggaacgccagatcaagatctggttccagaaccggcgcatgaagtacaagaaggaccagaaggccaagggcatcctgcactcgccggctagccagtcccctgagcgcagcccaccgctcggcggcgccgctggccacgtggcctactccggccagctgccgccagtgcccggcctggcctacgacgcgccctcgccgcctgctttcgccaaatcacagcccaatatgtacggcctggccgcctacacggcgccactcagcagctgcctgccacaacagaagcgctacgcagcgccggagttcgagccccatcccatggcgagcaacggcggcggcttcgccagcgccaacttgcagggcagcccggtgtacgtgggcggcaacttcgtcgagtccatggcgcccgcgtccgggcctgtcttcaacctgggccacctctcgcacccgtcgtcggccagcgtggactacagttgcgccgcgcagattccaggcaaccaccaccatggaccttgcgaccctcatcccacctacacagatctctcggcccaccactcgtctcagggacgactgccggaggctcccaaactgacgcatctgtagcggccgccgccagcccgaactcgcggcaaaattacctctcttgctgtagtggtggggtagagggtggggcccgcggggcagttcgggaacccccttccccgctcttgccctgccgccgcctcccgggtctcaggcctccagcggcggaggcgcaggcgaccgggcctcccctccatgggcgtcctttgggtgactcgccataaatcagccgcaaggatccttccctgtaaatttgacagtgccacatactgcggaccaagggactccaatctggtaatggtgtcccaaaggtaagtctgagacccatcagcggcgcgccctgcagagggaccagagcttggagagtcttgggcctggcccgcgtctagcttagtttcagagaccttaatttatattctccttcctgtgccgtaaggattgcatcggactaaactatctgtatttattatttgaagcgagtcatttcgttccctgattatttatccttgtctgaatgtatttatgtgtatatttgtagatttatccagccgagcttaggaattcgcttccaggccgtgggggccacatttcacctccttagtccccctggtctgaactagttgagagagtagttttgaacagtcgtaaccgtggctggtgtttgtagttgacataaaggattaagaccgcaaattgtccttcatgggtagagtcaggaagcccggtggcgtggcacaacacactttggtcatttctcaaaaaccacagtcctcaccacagtttattgatttcaaattgtctggtactattggaacaaatatttagaataaaaaaatttcccagtcaaaaaaaaaaaaaaaaaaaa

SEQ ID NO: 14835 - DNA, 2490 bp, Homo sapiens
atgacggatgaacaggtgtgcgagactgtggagaaatacggagccaaccgggaggagtgtgcccgcctcaacgcctccctctcctgcctcaggaatgtccacatgtcaggaggcaacctttccaaacaagactggaccatccagtggcccaccacagagacggggaaggagaacaatcccgtgtgccccccggagcccaccccgtggatccgcacccatctctcccagagccccagggtcccgtccaagtgcgtccagcactattgtcacaccagccccactcccggggcccctgtgtacacccacgtggacaggcttaccgtggacgcctacccgggcttgtgcccgcccccgccactggagtcgggccaccgttccctgcccccatcgccccggcagcggcacgcggtccgcaccccgccgcgcacccccaacatcgtcaccaccgtgaccccgccgggcacgccgcccatgaggaagaagaacaagctgaagcccccggggaccccaccgccctcctcccgaaaactgatacacttgatcccgggattcaccgcgctgcatcggagcaaatcccacgagttccagctggggcaccgcgtggacgaggcccacacgcccaaagccaagaagaagagcaaacccttgaacctcaagatccacagcagcgtaggcagctgcgagaacatcccctctcagcagcgctccccgctgctgtccgagcgctccctccgctccttctttgtgggacacgcacctttcctgccttccacccctcctgttcacactgaggccaacttctctgcaaacacactgtcagtgccacgctggtccccgcagatccctcgcagagatctcggcaactccatcaagcacaggttttccaccaagtactggatgtctcagacgtgcacagtctgtgggaaagggatgctttttggcctcaagtgtaaaaactgcaagttaaagtgccacaacaaatgcaccaaagaagccccaccctgtcatcttctgatcatccaccgaggagatccagcaaggttagtccggacagagtccgttccgtgtgacatcaacaaccctctacggaagccacctcgctattcagacctgcacatcagtcagacgctccccaaaaccaacaaaatcaacaaggaccacatccctgtcccttaccagccagactccagcagcaacccctcctccacgacgtcctccacgccctcctcgccagcaccccccctccctcctagtgccacgccgccttctcccctacacccttccccacagtgcacacggcagcagaagaacttcaacctgccagcatcccactactacaaatacaagcagcagttcatcttcccagatgtggtgccggtgccggagacgccgacccgggcgccccaggtcatcctgcatccggtgacctcgaatccaatcttggaaggaaatccattacttcaaattgaagtggagccaacgtcggagaatgaagaggtccatgatgaggccgaagagtcagaggatgacttcgaggagatgaacctgtccctcctctcggcccggagcttcccacgcaaggccagccagaccagcatcttccttcaggagtgggacatcccctttgagcagctggagatcggcgagctcattggaaagggccgctttgggcaagtgtaccacggccgctggcatggcgaggtggccatccggctgattgacattgagagggacaacgaggaccagctcaaggccttcaagcgggaggtgatggcctacaggcagacacggcatgagaacgtggtgcttttcatgggtgcctgcatgagcccgcctcacctggccatcatcaccagcctctgtaagggacggacgctctattccgttgtgagggatgccaaaatcgttttggatgtcaacaaaaccaggcagattgctcaagaaattgtgaagggcatgggctacctccacgccaagggaatcctacacaaggacctcaagtcaaagaacgtcttctatgacaacggcaaagtggtcatcacggactttggactcttcagcatttctggggtgctgcaggctggcaggcgggaggacaaactgcgcatccagaatggctggctatgccacctggcaccagagatcatccgccagctgtcccccgacacagaggaggataagctccccttctccaagcactctgacgtctttgcccttggcacaatctggtatgaactccacgccagggaatggcctttcaagacccaaccagcagaggcaataatctggcaaatgggcacaggcatgaaacccaacctcagccagattggcatgggaaaagaaatctcggacattcttctcttctgctgggcctttgaacaagaagagagacctaccttcaccaagctcatggacatgctggagaaactgccaaagcgaaaccgtcgcctgtctcaccctggacatttctggaagtctgcagagctgtga

SEQ ID NO: 14836 - DNA, 4682 bp, Homo sapiens
ggacttgaacacacgggaccggacaggaccgaccgaggggcggcggcgaaaggcagagcgccgcgatctctgtcgggaagcgcaacctccccgggccccgcggggccgcgcagggggcgtcctcaaccccgcgcccgctccctctttccatcccctgccgcccgcaggccaccccggggcccggccatccgcgcgcgcatccccgggttcgggcccgtccctggccctcgagggagccgccgccttcatcgccacatctgcagcggccgcaccagaggccgcccgggcgggaccccagcgtgagcatcgggcgcccccctaggagtgcaccacccccggagcccccctcaacacggaccgcgcccgccgggcacacaagaatggtcactcagatactgggggccatggagtctcaggtgggggggggcccggccggcccggccctgcccaacgggccactccttggtacaaatggagccactgacgacagcaagaccaacctcatcgtcaactacctgccccagaacatgacccaggatgagttcaagagtctcttcggcagcattggcgacatcgagtcctgcaagttggttcgggacaagatcacagggcagagccttggctacgggtttgtgaactattctgaccccaatgatgcagacaaagccatcaacaccctcaacggcctcaaattacagacgaagaccatcaaggtgtcctatgccagacccagttcagcatccatccgggatgctaacctgtacgtcagcgggctccccaagaccatgagccagaaagagatggagcagctcttctcccagtacggccgcatcatcacgtcccgcatcctggtggaccaggtcacaggtgtctctcggggtgtgggattcatccgctttgacaagaggattgaggccgaagaggctatcaaaggactgaatgggcagaagccgctgggcgcagctgagcccatcacagtcaagttcgcgaacaacccaagtcagaagacggggcaggcgctgctcacccacctctaccagtcatccgcccggcgctacgcaggccccctacaccatcagacccagcgtttccggctggacaatttgctcaacatggcctacggcgtcaagagtcccctgtcgctcatcgccaggttctcgccgatcgccatcgatggtatgagcggcctggcgggcgtgggcctgtcggggggcgcggcgggcgccggctggtgcatcttcgtgtacaacctgtcaccggaggcagacgagagcgtgctgtggcagctgttcgggccttttggggcagtcaccaacgtcaaggtcatccgtgatttcaccaccaacaagtgcaagggtttcggcttcgtgaccatgaccaactatgacgaggcggccatggccatcgccagcctgaacggctatcgcctgggcgagcgcgtgctgcaggtctccttcaagaccagcaaacagcacaaggcgtgagcccaccccgcctgccctcccaccccctccccgggcagcagagagagagagagagaaagagagagagagagagagaaggggcccaagagagacagcacaggcagccccacggacgacgcgagggccccacgtccctgcggaagccacagggtgagcactctggggtgggagggtctgcagggaattgggggggtgcccggggatcccccgccccatcctcctgcccccaccccaggctgggctgttcactctctcgtcttggtttggttcatggtgaaggtttttgtttcttttttcggctaaaaagaatgcagagatgtgcccccacccccaccctcgaccacccccgatgggatggcttggggggctccagggggtgccctcccagacccccttgcccaggcctccccagcacctaggtggggcctggggtaggaggaacaggtttaaaaatccccaaaaaagcgaaccgtgaggaggggtgtgggcacccccggcccagtgccccctggtggaatgcgggggagcaggcagtggggctggaagcagaaacaaaatgaaaaaaaaaggggggtgggaggggaagaaaaactctatttttgtaaaaagggaaaaagacctcgtggagaatttttactggggattcttgaacttgaaaaaaaaaaacacaaaaaaagacaaaaaaaaaaaaagaaaatattttggcaggttatgtttaccaactggggcgggggtggggggggcccagggagcagggcttaggggctagcagcccacggggccacacagagaaacaaccacgcagacagtcacaccacggggacacacggacagacgcagacggacacagcgacatgccccagacacgttaagggactggttggccaaactcagacacgtggacagggatagacagaaagagacagaagctggggctacgtccatgtggacacagaccacagatgtgggcacacgaatccatccacctgtccacgtgcacacgtgaatgtagcgatagatatttggacatcaaatttggacaccaggtcacggagaaacacaaacaccacccaggaacacgcagacatatgcccatagcatcccacaggcccaggcaggaggtcccaccccagaccctgccccagacgctccctcaccctctcggccccctcgccctggcccccaggttctctgcagagatctctcctggacccccagcggtctccttggcgcccacgaacacaggcgtgcacacgcagcgcacatgcattgagacacacgatacctcgttccaccttggcgtcacggtgggctggaggcagcccccccccccacaacacttgaggccaaaggacacccctgtccccggggctcagcctccccctgggccgaggccttggcccacacagctgagggagaggcccagccctgagcctcccccaccaggactgggcctccccggcagcaagaccccggcactccccgccaggcccagggtggggtggatgggcccaaaggcccagccccacactcctttcccgtccacttgtcacctacctatcccctttcggtttgttgggtttttcgtctttccagattgcagtggacacagcccccgatctcgagccccggcccccggcttctgtctggacattgcatcgccctagttttctttctttaaaaaaaaaaaattccaacagaagccacaggccggagcccctgggagccctcgcaccgctccccaccccactcagcggccccatcggaactgagaattgcaaaacccccgactttagctatagttaagttgccttcccccggtgtccccacgtttggtgtctggctatggcgcccccatctgactgtccagctctctctcccccacccctcccggtgttgttattaaacgtctgtggagcttctgctgcaaggaacaaaaaagaaaaaaatcaaaaaagcgacaaaaaaacacaaacagaagaggaaaaaaaagcaacaaaaaaagaaaacacacagaagagatttaaaaaaaaaaaaggaaaaaaaaaaaagacataaactggcaccagttaactttcttgtacttttttgctgaatttagcttcttgtagttttaacttattgctatgttaactatttattctcctcgttgccctgtaaggacatccgtgtatatttctgttacttcatccggtttgcaagttaaaggaacgacaatgttctctttgtttctttaagttttgccgagacatggttatgcctaatttatttataaaaggggaagtggaatcattaaagtaataataattattaataacagtaatggtagccgagtggcacgcgggggcgtgtgctctgcgggacagtccccacggccagcgacgtccaggtcaccaatgggattctttttgctcttgtcttgagaattttttcagtcctatttagctggtgaaatccctagcttgttcttgatacacgaacctatttattctcgtggttttaagtcctccctgccctctctcctctcccctgcagcagggcagggacccctctcccctgctgtctcttggggctctctcccctccgccctctgcattcgggaacacgcacgtccgcgtgggaagcttgcagcagggcgtccgagcaataagggctgggtttgtcccccaccctggggggggccaggctccagagagggggcacctccccacacaccccccccccaccgaggcctaggcccctgccacccccaagactgggaggggacttctttttctaaaacacaaaactcagcccagccaggccccctccctggaggccagcccctccccgcagggggccaggccggggctcccaggcgagggggacttggggcttccacgtccctggggggcaggggccaggccaggggggagggggctcagcccctccacccctcccttcatcctgttatttattcggaaggtttcaaatcacgacagagtccatgttggaggtgataaaaaactgtaaaaaaaaaaaaaaaaaaaaagacaaaacaaaagacaaaaaaaaaaaaaaaacccaacaagaacacttcgcgttgcgtttagactatttattaccgggatcacaggcctggccgcggtaacagacttttacatggaattgtttaattatttgtacttttcatgccagaaaataaaagttcagaatctt

SEQ ID NO: 14837 - DNA, 2233 bp, Homo sapiens
gggacggcgacagcgggtcggcgggccgcaggagggggtcatgggtaaagactactaccagacgttgggcctggcccgcggcgcgtcggacgaggagatcaagcgggcctaccgccgccaggcgctgcgctaccacccggacaagaacaaggagcccggcgccgaggagaagttcaaggagatcgctgaggcctacgacgtgctcagcgacccgcgcaagcgcgagatcttcgaccgctacggggaggaaggcctaaaggggagtggccccagtggcggtagcggcggtggtgccaatggtacctctttcagctacacattccatggagaccctcatgccatgtttgctgagttcttcggtggcagaaatccctttgacaccttttttgggcagcggaacggggaggaaggcatggacattgatgacccattctctggcttccctatgggcatgggtggcttcaccaacgtgaactttggccgctcccgctctgcccaagagcccgcccgaaagaagcaagatcccccagtcacccacgaccttcgagtctcccttgaagagatctacagcggctgtaccaagaagatgaaaatctcccacaagcggctaaaccccgacggaaagagcattcgaaacgaagacaaaatattgaccatcgaagtgaagaaggggtggaaagaaggaaccaaaatcactttccccaaggaaggagaccagacctccaacaacattccagctgatatcgtctttgttttaaaggacaagccccacaatatctttaagagagatggctctgatgtcatttatcctgccaggatcagcctccgggaggctctgtgtggctgcacagtgaacgtccccactctggacggcaggacgatacccgtcgtattcaaagatgttatcaggcctggcatgcggcgaaaagttcctggagaaggcctccccctccccaaaacacccgagaaacgtggggacctcattattgagtttgaagtgatcttccccgaaaggattccccagacatcaagaaccgtacttgagcaggttcttccaatatagctatctgagctccccaaggactgaccagggacctttccagagctcaaggatttctggacctttctaccagttgtggaccatgagagggtgggagggcccagggagggctttcgtactgctgaatgttttccagagcatatattacaatctttcaaagtcgcacactagacttcagtggtttttcgagctatagggcatcaggtggtgggaacagcaggaaaaggcattccagtctgccccactgggtctggcagccctcccgggatgggcccacatccacctccagtccctggccaggggtgagaggcagaccagcagatggacttgatccctctgtgtctttgggcttctggctggtagataatgtcaacctgcagtcttgattcccagaccctgtacactcctccttttctgttgtgtgatcagtttgtgctttattctgtatttgtctcccatgtcttgctcttctcctggagaattctgtcttctctttggccatctcaaattgagaacctaaactattcctgcagaactgcctggttggcgtccacaagcaatacctctcgttccagcaggaccaagggagccagcctccagtgagtgactccagcaagtgcagccacctctcccttgatggtctgggagcctggcctcagcaaggggccttcctgacctctggctccagtgaagctgaatgtcctcactttgtgggtcacactctttacatttctgtaaggcaatcttggcacacgtggggcttaccagtggcccaggtaattttttgtttcatggactatggactctttcaaagggatctgatccttttgaattttgcacagccctagatacaatcccttttgataaaagggtctttgcttctgattacaggagcactgtggaacgtctgtaaatatgtttttataattccatgtatagttggtgtacactcaaaacctgtccccggcagccagtgctctctgtatagggccataatggaattctgaagaaatcttggggagggaaggggagttggaacaaatgtctgttccctggaggccagtccagtgctcagacctttagactcattgtaagttgccactgccaacatgagaccaaagtgtgtgactagtcaatgaagtgcgacagcattaaagactgatgctaaacctc

SEQ ID NO: 14838 - DNA, 3513 bp, Homo sapiens
aggcaggggcggtgcgggggcgtgggcagcacaagccgtgcgctcccgggctgcgaggtctggctaggctacgggccacgcgccgccgccgctgccgccgccactgtcctcttcggaggcgcgggcccgacggaaaccatgtttgtggctcgcagcatcgcggcggaccacaaggatctcatccacgatgtctctttcgacttccacgggcggcggatggcaacctgctccagcgatcagagcgttaaggtctgggataaaagtgaaagtggtgattggcattgtactgctagctggaagacacatagtggatctgtatggcgtgtgacatgggcccatcctgaatttgggcaggttttggcttcctgttcttttgaccgaacagctgctgtatgggaagaaatagtaggagaatcaaatgataaactgcgaggacagagccactgggttaaaaggacaactctggtggatagcagaacatctgttactgatgtgaagtttgctcccaagcacatgggtcttatgttagcaacctgttccgcagatggtatagtaagaatctatgaggcaccagatgttatgaatctcagccagtggtctttgcagcatgagatctcatgtaagctaagctgtagttgtatttcttggaacccttcaagctctcgtgctcattcccccatgatcgccgtaggaagtgatgacagtagccccaacgcaatggccaaggttcagatttttgaatataatgaaaacaccaggaaatatgcaaaagctgaaactcttatgacagtcactgatcctgttcatgatattgcattcgctccaaatttgggaagatctttccatattctagcaatagcgaccaaagatgtgagaatttttacattaaagcctgtgaggaaagaactgacttcctctggtgggccaacaaagtttgaaatccatatagtggctcagttcgataatcataattctcaggtctggcgagtgagttggaatataacaggaacggtgctagcatcttcaggagatgatgggtgtgtaagattgtggaaagctaattatatggacaattggaagtgtactggtattttgaaaggtaatgggagcccagtcaatgggagttctcagcagggaacctcaaatccttccctaggttcaactattccaagtcttcagaattcattaaatggatcttctgctggcagaaagcacagctgagtacaagctaactggagtaactttgctgttttgctgcttgttgcatgcacacaggaatggaaagcgagctccttttccccttccccagcgccgtttgacctctcccaagatacaccagcagcctgcttactactaaacgcaatccaaaaggcctttaaaaatacagtgtatattttttgtactagtcagtttattgacactatttgaaacttttgaaatataaacggagaggctttctgttgagacattgtcaccaaaacaattttttgaaatgttcctgaaactaatttgggtttaaagattaaaagggttgttaccattcttatctgagtagttgggaggaggggaataccactttagttcatttggaaaatatagacatatttcttttgctttcttaaaacagcttaaaatgatgaacttttataattttaatttgaagattgaataaatattttttataaagattgttttgagtgctgatttgtttactttttgtagatttgctttatccatgatattcagtacaactctgtcatttctttgtaatatttaaaaaatattagtaaaggagtgaattaataaagtagtaatagtaaaatgaaaggaacttgactgtacagtttgtagccaggttaagcatttggtattgtttcatttacaatttgggactaagatggaaacactttttttataagtttttaattcatagtcactaaagagataaatgtttcttatatacatttgtgtatttttatggtgttatttattccatggcttagcttccttcaaatcaaaatttggacacacactattaagagaagccattaaaattttactaaaattgtgcatgtaaattaattgtcagcattccatgtctcaagattttcttaatttagttcgctgtttaaattaattcatgtcctgtaaagttctgaccttgataacaaagctataaatatttaagtttgctaatatgcgtaagtattatcggtaagttacaagatggaagaagaataacagtagggcacagtcattctgtgaatccttttacttatcaaaatttggtagctattctaaggcttttgcagaaaaataagtgttcaatgtttgtagttcttcaaaagcatgttgcagtagccagccatactatgtgtattcccagtatcatgtacgcactaaaaaaaatgtgtgcttgctgctgctgtgagtgaaccattgcttaagataaaaaacttaactagatctgtaaatgtacagaatagcatcagatgtttctgagagattagaaaatgttttgaatttataaaattaatgtttttctttgtaacatttatatatattttttaacattttaagtttaacagattgtattcctttcaagtttctatacttgcttaagcaatcttgatttgagtaagggtcttgatttgtgctattatgttctgttagttttggcatgaatatactaaagcttttttttttttttctagcatgtgttttctcctctttggttctctttgtatttactacttttctctttttcttgtgttttttttttcctgtttttgttttgtttggtgttttgttcctgtcttcattgtttcaggtatttctttacccctctggattccccacgggctggatcgagatggtccagttatgcccagctccttcctcctcctcctcctcctctggtagagcactcttgcgatgctgacactgccaacctccagtatcctcaccctcgcagacgatatctctctcggcctcttaatcccttacctgagaatgaagggatttaaaacactgatttaacattgaaaggccttattcaagtgcttgtaaatgctttcatttctggctgctttttgtttttcattttctttcagaagatttttctaacttagggtctgtcttgcatgtattacaaccagaatacagtgtttggaacctaaatctgtttgtgcgtctgcatcaaaggaacatttgcttcactgggtgataacctttgatgaaatgagatatgtccaagtaacgttaactgtgaagttacacacagtagctgacttcaaagtgcctgttctgtaaattttattttaaactgttaccatagtcttaagttgtttatgctttatcagactggctaatgtgaaagcataatattatgaagtttattctgccttatgagaccttaaaaaatggatttcattttacaggctaatgttgtaactgactagtatgtaaaataaatcattcctgtgtataaagcagcaaaacctaaaaaaaaaa

SEQ ID NO: 14839 - DNA, 977 bp, Homo sapiens
ggagaggccgaggcgtagcctaagcgtgggattccgcgcgtgcgctcggctccgcctggtgcggccgcggccgggagggactggattatgtcggccccgtttgaggagcggagtggggtggtaccgtgcgggaccccgtggggccagtggtaccagaccttggaggaggtgttcattgaagttcaggtgccgccaggcacgcgcgcccaggatatccagtgcggcctccagagccggcatgtggcgctgtcggtgggcggccgcgagatcctcaagggcaaactctttgattctacaatagctgatgagggaacatggactttggaggacagaaaaatggttcgtattgttcttacaaagacaaagagagatgcagcaaattgttggacttctctactagaatctgaatatgcagcggatccttgggtgcaagaccaaatgcagagaaagcttacattagagagattccaaaaagaaaatcctggttttgacttcagtggagcagaaatctcaggaaactacactaaaggtggaccagatttctcaaaccttgagaaataactgctttttttcctgcattctgtggatcctagcagatattgccaacttaatcagataaacagattatgtaatggaagaaaaatgcggatgcctacagttaacagattgcaaaatgtatcttaaaatggttctaaaaattgcattcaaacataatttacataggaaatgtactgtgggaactattctatggatatatggtaaagttgttttggacttgtttttgctcagcatgaagttttatatgctgcattttactaattccatatttaaccatatttttaatacaaaagaacattagagtatagatcatgtgaaatgaagggtgcctttggggaaaattaactttttcttttgataagtatgatattcaataaaattttctaaataaaaaaaaaaaaaaaaaaaaaaaaaaaaaa

SEQ ID NO: 14840 - DNA, 2658 bp, Homo sapiens
gctgaagtaccggtcagccagcctcctgctgcagagccagtgaactcaggtcgggcttctcagctgcgcacataggcagtactcatcttggccctgggaagaaactcaagaagaagcttttgaaacataaagcttggatggggtttgacctctgcagggcagcgcccagctataggagttcccctgctgagcagagaagatgactgcagaattgagagaagccatggccctagccccatggggcccagtgaaggtgaaaaaggaggaggaagaagaagaaaacttcccaggtcaggcatccagccaacaagtgcactccgagaacatcaaagtctgggccccagtgcagggtcttcagacaggccttgatggatcagaagaggaagaaaagggtcagaacatatcctgggatatggcggtagtcctgaaagcaactcaggaggcacctgctgcttcaacccttggcagctactcattaccagggactctggccaagagtgagatactggagactcatgggaccatgaactttctaggtgctgaaaccaagaacctacagttactggttccaaaaactgagatatgtgaggaagctgaaaaacccctcatcatatcagaaagaatccagaaagctgatcctcaaggacctgagttaggagaagcttgtgaaaagggaaacatgttaaagaggcagagaataaagagagaaaagaaagatttcagacaagtgatagtgaatgactgtcacttacctgaaagcttcaaagaagaggaaaaccagaaatgtaagaaatctggaggaaaatatagccttaattctggcgctgttaaaaatccaaaaacccagcttggacaaaagccttttacgtgtagcgtgtgtgggaaaggatttagtcagagtgcaaacctcgttgtgcatcagcgaatccacactggagagaaaccctttgaatgtcatgagtgtgggaaggccttcattcagagtgcaaacctcgttgtgcatcagagaatccacactggacagaaaccttatgtttgctcaaaatgtgggaaagccttcactcagagttcaaatctgactgtacatcaaaaaatccactccttagaaaaaacttttaagtgcaatgaatgtgagaaagcctttagttacagctcacaacttgctcggcaccagaaagtccacattacggaaaaatgctatgaatgtaatgaatgtgggaaaacatttactaggagctcaaacctcattgtccaccagaggatccacactggggagaagccctttgcctgtaacgactgtggcaaagcctttacccagagtgcaaatcttattgtacatcagcgaagccatactggtgagaagccatatgagtgtaaagagtgtgggaaagcctttagttgtttttcacaccttattgtgcaccagagaattcacactgcagagaaaccttacgactgcagcgaatgtgggaaagccttcagtcagctctcttgccttattgtccaccagagaattcacagtggagatcttccttacgtgtgtaatgaatgtgggaaggccttcacatgtagctcatacctacttattcatcagagaattcataatggagaaaaaccttacacatgtaatgagtgtgggaaggccttcagacagaggtcgagcctcaccgtgcaccagagaacccacactggggagaagccctatgaatgtgagaagtgtggtgcagctttcatttccaactcacacctcatgcgacaccatagaacccatcttgttgaataacaagtaaggaagaggaagacctccagcattggtcataaccttctgcctccctaatgagacacctctttgctgttttcttcctcctctataaaagtgagggctgtgtccttaaaagttatagttttcaggaatgcagcagaagacacaagaaaagcatttcagaggctaatttaaaacaaaaagtaagcacctaaaggcaaggactttgttttaactgtaccttaagcggtcatgttctctgaagtggaatgtggctttcctaggaatgggtcgtacaaagctaagtggtaatgatgctatttggggaaaggtcttttttgcttaattttgttttttaaaactctgatgattgcttgagcaacaggcaggttatctgcctggttgaattctggttgaaccgtgtattctaatatttctggttaagtggtgactgggtaaggaaaccacttggggtagcagttcaacaattcacttacgaatgtttataagctttccatttcctaggtaattttttaaaagccagtcaaaacaaaaactttactgaaaatggacagaaataggaaatggactttttccttactgtctatacctcctgaaccttggtattgtaaagatctggggacctctgggtctgttctgaccattccctagtctccatggccaagcactcaaggattgatggacaccacacaccagctatattcatttgccaagatcaacagctccttctccaaacaactcaagcccccaattcccatcgcattccatttgggtgagatgcaactaacagccccttcctggatgaaggagtcaaagaataaagcttgcctagaggcaaaaaaaaaaaaaaaaaaaaaaaaaaaaaaaaaaaaaaa

SEQ ID NO: 14841 - DNA, 3091 bp, Homo sapiens
actcagtgttcgcgggagcgccgcacctacaccagccaacccagatcccgaggtccgacagcgcccggcccagatccccacgcctgccaggagcaagccgagagccagccggccggcgcactccgactccgagcagtctctgtccttcgacccgagccccgcgccctttccgggacccctgccccgcgggcagcgctgccaacctgccggccatggagaccccgtcccagcggcgcgccacccgcagcggggcgcaggccagctccactccgctgtcgcccacccgcatcacccggctgcaggagaaggaggacctgcaggagctcaatgatcgcttggcggtctacatcgaccgtgtgcgctcgctggaaacggagaacgcagggctgcgccttcgcatcaccgagtctgaagaggtggtcagccgcgaggtgtccggcatcaaggccgcctacgaggccgagctcggggatgcccgcaagacccttgactcagtagccaaggagcgcgcccgcctgcagctggagctgagcaaagtgcgtgaggagtttaaggagctgaaagcgcgcaataccaagaaggagggtgacctgatagctgctcaggctcggctgaaggacctggaggctctgctgaactccaaggaggccgcactgagcactgctctcagtgagaagcgcacgctggagggcgagctgcatgatctgcggggccaggtggccaagcttgaggcagccctaggtgaggccaagaagcaacttcaggatgagatgctgcggcgggtggatgctgagaacaggctgcagaccatgaaggaggaactggacttccagaagaacatctacagtgaggagctgcgtgagaccaagcgccgtcatgagacccgactggtggagattgacaatgggaagcagcgtgagtttgagagccggctggcggatgcgctgcaggaactgcgggcccagcatgaggaccaggtggagcagtataagaaggagctggagaagacttattctgccaagctggacaatgccaggcagtctgctgagaggaacagcaacctggtgggggctgcccacgaggagctgcagcagtcgcgcatccgcatcgacagcctctctgcccagctcagccagctccagaagcagctggcagccaaggaggcgaagcttcgagacctggaggactcactggcccgtgagcgggacaccagccggcggctgctggcggaaaaggagcgggagatggccgagatgcgggcaaggatgcagcagcagctggacgagtaccaggagcttctggacatcaagctggccctggacatggagatccacgcctaccgcaagctcttggagggcgaggaggagaggctacgcctgtcccccagccctacctcgcagcgcagccgtggccgtgcttcctctcactcatcccagacacagggtgggggcagcgtcaccaaaaagcgcaaactggagtccactgagagccgcagcagcttctcacagcacgcacgcactagcgggcgcgtggccgtggaggaggtggatgaggagggcaagtttgtccggctgcgcaacaagtccaatgaggaccagtccatgggcaattggcagatcaagcgccagaatggagatgatcccttgctgacttaccggttcccaccaaagttcaccctgaaggctgggcaggtggtgacgatctgggctgcaggagctggggccacccacagcccccctaccgacctggtgtggaaggcacagaacacctggggctgcgggaacagcctgcgtacggctctcatcaactccactggggaaggctcccactgcagcagctcgggggaccccgctgagtacaacctgcgctcgcgcaccgtgctgtgcgggacctgcgggcagcctgccgacaaggcatctgccagcggctcaggagcccaggtgggcggacccatctcctctggctcttctgcctccagtgtcacggtcactcgcagctaccgcagtgtggggggcagtgggggtggcagcttcggggacaatctggtcacccgctcctacctcctgggcaactccagcccccgaacccagagcccccagaactgcagcatcatgtaatctgggacctgccaggcaggggtgggggtggaggcttcctgcgtcctcctcacctcatgcccaccccctgccctgcacgtcatgggagggggcttgaagccaaagaaaaataaccctttggtttttttcttctgtatttttttttctaagagaagttattttctacagtggttttatactgaaggaaaaacacaagcaaaaaaaaaaaaaagcatctatctcatctatctcaatcctaatttctcctcccttccttttccctgcttccaggaaactccacatctgccttaaaaccaaagagggcttcctctagaagccaagggaaaggggtgcttttatagaggctagcttctgcttttctgccctggctgctgcccccaccccggggaccctgtgacatggtgcctgagaggcaggcatagaggcttctccgccagcctcctctggacggcaggctcactgccaggccagcctccgagagggagagagagagagagaggacagcttgagccgggcccctgggcttggcctgctgtgattccactacacctggctgaggttcctctgcctgccccgcccccagtccccacccctgcccccagccccggggtgagtccattctcccaggtaccagctgcgcttgcttttctgtattttatttagacaagagatgggaatgaggtgggaggtggaagaagggagaagaaaggtgagtttgagctgccttccctagctttagaccctgggtgggctctgtgcagtcactggaggttgaagccaagtggggtgctgggaggagggagagggaggtcactggaaaggggagagcctgctggcacccaccgtggaggaggaaggcaagagggggtggaggggtgtggcagtggttttggcaaacgctaaagagcccttgcctccccatttcccatctgcaccccttctctcctccccaaatcaatacactagttgtttct

SEQ ID NO: 14842 - DNA, 2153 bp, Homo sapiens
gcacgaggcgaatccctgcttaaaggccttgctttcttgtctaacgccgcaaccagtcctctgagttgccaacgtctttcttcttgtctcgacgccccgtcgtccggccacagcgattctctgcttagcaggatcggtccacagcgggacgtgagtccctttcctcctcgcggcttaccgcctctctccgcctagtgccaggtgctaataaagttgttgtttcaaatgcggccaggaacatcgcgagcggggaccaatcagagagtagctttgcctctataacggcgcgagagtgagacgtcatcggtgagcgactaacgctagaaacagtggtgcgcggagaggagaggcctcgggatgtctctggcagatgagctcttagctgatctcgaagaggcagcagaagaggaggaaggaggaagctatggggaggaagaagaggagccagcgatcgaggatgtgcaggaggagacacagctggatctttccggggattcagtcaagaccatcgccaagctatgggatagtaagatgtttgctgagattatgatgaagattgaggagtatatcagcaagcaagccaaagcttcagaagtgatgggaccagtggaggccgcgcctgaataccgcgtcatcgtggatgccaacaacctgaccgtggagatcgaaaacgagctgaacatcatccataagttcatccgggataagtactcaaagagattccctgaactggagtccttggtccccaatgcactggattacatccgcacggtcaaggagctgggcaacagcctggacaagtgcaagaacaatgagaacctgcagcagatcctcaccaatgccaccatcatggtcgtcagcgtcaccgcctccaccacccaggggcagcagctgtcggaggaggagctggagcggctggatgaggcctgcgacatggcgctggagctgaacgcctccaagcaccgcatctacgagtatgtggagtcccggatgtccttcatcgcacccaacctgtccatcattatcggggcatccacggccgccaagatcatgggtgtggccggcggcctgaccaacctctccaagatgcccgcctgcaacatcatgctgctcggggcccagcgcaagacgctgtcgggcttctcgtctacctcagtgctgccccacaccggctacatctaccacagtgacatcgtgcagtccctgccaccggatctgcggcggaaagcggcccggctggtggccgccaagtgcacactggcagcccgtgtggacagtttccacgagagcacagaagggaaggtgggctacgaactgaaggatgagatcgagcgcaaattcgacaagtggcaggagccgccgcctgtgaagcaggtgaagccgctgcctgcgcccctggatggacagcggaagaagcgaggcggccgcaggtaccgcaagatgaaggagcggctggggctgacggagatccggaagcaggccaaccgtatgagcttcggagagatcgaggaggacgcctaccaggaggacctgggattcagcctgggccacctgggcaagtcgggcagtgggcgtgtgcggcagacacaggtaaacgaggccaccaaggccaggatctccaagacgctgcagcggaccctgcagaagcagagcgtcgtatatggcgggaagtccaccatccgcgaccgctcctcgggcacggcctccagcgtggccttcaccccactccagggcctggagattgtgaacccacaggcggcagagaagaaggtggctgaggccaaccagaagtatttctccagcatggctgagttcctcaaggtcaagggcgagaagagtggccttatgtccacctgaatgactgcgtgtgtccaaggtggcttcccactgaagggacacagaggtccagtccttctgaagggctaggatcgggttctggcagggagaacctgccctgccactggccccattgctgggactgcccagggaggaggccttggaagagtccggcctggcctcccccaggaccgagatcaccgcccagtatgggctagagcaggttttcatcatgccttgtcttttttaactgagaaaggagattttttgaaaagagtacaattaaaaggacattgtcaaaaaaaaaaaaaaaaaaa

SEQ ID NO: 14843 - DNA, 1909 bp, Homo sapiens
gctggtggtggcgcgcggcgcggcgcggcgatggcggcgggtggcagcgatccgcgggctggcgacgtagaggaggacgcctcacagctcatctttcctaaagagtttgaaacagctgagacacttctaaattcagaagttcatatgcttctggaacatcgaaagcagcagaatgagagtgcagaggacgaacaggagctctcagaagtcttcatgaaaacattaaactacacagcccgtttcagtcgtttcaaaaacagagagaccattgccagtgttcgtagcttgctactccagaaaaagcttcataagtttgagttggcctgtttggccaacctttgcccagagactgctgaggagtccaaggctctaatcccaagcttggagggacggtttgaagatgaggagctgcagcagattcttgatgatatccagacaaagcgcagctttcagtattaatctccaaacatcactgctgctcggagaaaccacatccccaggcataacaccaccttcccactgtctggggctgacttgcacagaaattctgttgaagacagttgagaattcctttggagaaaacagcccagcttggcgtggggttaggttgctgtttcaaataactcacaggcccaggtgacatggaatcttggagcagccttgtgcagtggcagccagtggcttcctgaacgtgcctctgcgaagtgtgagatgaggggtcacataaccacactgttgactacctcattcctggtttttggcctccacatcatcttttttcttaatatttcatgttttaatttcagggtgtttatactttttgaaactagaccagaagatagtagactttatagagaaagaccagttttacctagatactaaaggaagaattaaaccgctgttagtttgaaatgctttttttttttttttttaaatggagatagggtcttaactcttgtccaggctggaggagtgcagtcgtacagtcatggctcactgaagtcttgaccccgctgcctcagcctcccaaataactggggccacaggtgtgcaccacaactctcagctaatttttaaaattttttatagaggtggggttttactatgctgtccagactggtcttaaactcctgggctcaagtgatccccctgccttggcctcccaaactggtgagattacaggcatgagccaccacaactggcctgaaattcttaaaggatgggagtgtcgatgacagcaccttggcatcgttgtgcctaacctgggagacggaagaagcacgccatgggaagtgtttacacttgggggacaagtgctaagtattgtggagcccatagccccttgagatagatggctactttgcctttcttcttgaactgtcttgcagaatgtggatttggggtaagtggtcttgaaggattcatttagtcaccctcaaattaagatttttacttcatctttcttgggcctgcacctccaagataacaaagaagaagcaatggtcgtgccaaagaggtccacaaccaggtgtgcactgttcactgcagcccatttgctgtatgaactgtggttgttgtgtgcccaatgacaaggctactaagaaattcatcatttgaaacgtagaggccgcagcagtcagcgatgtttctgaaatgagcatccttgacgcctgtgtacttcccaggctggatgtgaagctacattaccatgtgagttgtgccattcacagcacagtggtgaggaattgagctcatgaagcaggcaaggaccgaacacctccaccccaacgtagacctgcaggtgctgccccatgacctccaccaaagcccatataaggagcggagttgttaaggactgaagaaaaacttctctggagaaaaataaaattgcaattctacttaaaaaaaa

SEQ ID NO: 14844 - DNA, 3385 bp, Homo sapiens
gctctggtgctgcggctccgctctcgtcgcaacgagatctttcgagatcttctccgcccccgctaccggcgcctcctctgcggccactgagccggagccggcctgagcagcgctctcggttgcagtacccactggaaggacttaggcgctcgcgtggacaccgcaagcccctcagtagcctcggcccaagaggcctgctttccactcgctagccccgccgggggtccgtgtcctgtctcggtggccggacccgggcccgagcccgagcagtagccggcgccatgtcggtggtgggcatagacctgggcttccagagctgctacgtcgctgtggcccgcgccggcggcatcgagactatcgctaatgagtatagcgaccgctgcacgccggcttgcatttcttttggtcctaagaatcgttcaattggagcagcagctaaaagccaggtaatttctaatgcaaagaacacagtccaaggatttaaaagattccatggccgagcattctctgatccatttgtggaggcagaaaaatctaaccttgcatatgatattgtgcagttgcctacaggattaacaggtataaaggtgacatatatggaggaagagcgaaattttaccactgagcaagtgactgccatgcttttgtccaaactgaaggagacagccgaaagtgttcttaagaagcctgtagttgactgtgttgtttcggttccttgtttctatactgatgcagaaagacgatcagtgatggatgcaacacagattgctggtcttaattgcttgcgattaatgaatgaaaccactgcagttgctcttgcatatggaatctataagcaggatcttcctgccttagaagagaaaccaagaaatgtagtttttgtagacatgggccactctgcttatcaagtttctgtatgtgcatttaatagaggaaaactgaaagttctggccactgcatttgacacgacattgggaggtagaaaatttgatgaagtgttagtaaatcacttctgtgaagaatttgggaagaaatacaagctagacattaagtccaaaatccgtgcattattacgactctctcaggagtgtgagaaactcaagaaattgatgagtgcaaatgcttcagatctccctttgagcattgaatgttttatgaatgatgttgatgtatctggaactatgaatagaggcaaatttctggagatgtgcaatgatctcttagctagagtggagccaccacttcgtagtgttttggaacaaaccaagttaaagaaagaagatatttatgcagtggagatagttggtggtgctacacgaatccctgcggtaaaagagaagatcagcaaatttttcggtaaagaacttagtacaacattaaatgctgatgaagctgtcactcgaggctgtgcattgcagtgtgccatcttatcgcctgctttcaaagtcagagaattttctatcactgatgtagtaccatatccaatatctctgagatggaattctccagctgaagaagggtcaagtgactgtgaagtcttttccaaaaatcatgctgctcctttctctaaagttcttacattttatagaaaggaacctttcactcttgaggcctactacagctctcctcaggatttgccctatccagatcctgctatagctcagttttcagttcagaaagtcactcctcagtctgatggctccagttcaaaagtgaaagtcaaagttcgagtaaatgtccatggcattttcagtgtgtccagtgcatctttagtggaggttcacaagtctgaggaaaatgaggagccaatggaaacagatcagaatgcaaaggaggaagagaagatgcaagtggaccaggaggaaccacatgttgaagagcaacagcagcagacaccagcagaaaataaggcagagtctgaagaaatggagacctctcaagctggatccaaggataaaaagatggaccaaccaccccaagccaagaaggcaaaagtgaagaccagtactgtggacctgccaatcgagaatcagctattatggcagatagacagagagatgctcaacttgtacattgaaaatgagggtaagatgatcatgcaggataaactggagaaggagcggaatgatgctaagaacgcagtggaggaatatgtgtatgaaatgagagacaagcttagtggtgaatatgagaagtttgtgagtgaagatgatcgtaacagttttactttgaaactggaagatactgaaaattggttgtatgaggatggagaagaccagccaaagcaagtttatgttgataagttggctgaattaaaaaatctaggtcaacctattaagatacgtttccaggaatctgaagaacgaccaaaattatttgaagaactagggaaacagatccaacagtatatgaaaataatcagctctttcaaaaacaaggaggaccagtatgatcatttggatgctgctgacatgacaaaggtagaaaaaagcacaaatgaagcaatggagtggatgaataacaagctaaatctgcagaacaagcagagtttgaccatggatccagttgtcaagtcaaaagagattgaagctaaaattaaggagctgacaagtacttgtagccctataatttcaaagcccaaacccaaagtggaacctccaaaagaggaacaaaaaaatgcagagcagaatggaccagtggatggacaaggagacaacccaggcccccaggctgctgagcagggtacagacacagctgtgccttcggattcagacaagaagcttcctgaaatggacattgattgattccaacacttgtttctattaaaacagactattataaagctttaagttgtcaactttgttctaaatatcaactagcgcaagtgaatactgaagatttcttagtcagtttttaggggattttcggggaggggaaataggtaatgtatggagcattttcacttctaaatagttagatacagaaattaagtgcattgtatctttttcataatggtactatttagaagcccagttagtcttactgagcttatgcttcactcctttatgtttaaccatgtgtctacaagaataagtttgttttggaaagttgagctatagctacagctctagctatccagcagacttttcattatgacttacatggcaggagctctaattatgctttaaaaatctgttgtggagattgctttaaatgctccctgcctggtgtggggatggggtccccctctttgtgagggctggagcatggcacggcatggattaacacggcagaggaacaaaggtgtgctctgagcttcttcatatttcaccttcaccctcacctgtgttctcttccctctctcccaataaaagggctcccatta

SEQ ID NO: 14845 - DNA, 1309 bp, Homo sapiens
gctctggtgctgcggctccgctctcgtcgcaacgagatctttcgagatcttctccgcccccgctaccggcgcctcctctgcggccactgagccggagccggcctgagcagcgctctcggttgcagtacccactggaaggacttaggcgctcgcgtggacaccgcaagcccctcagtagcctcggcccaagaggcctgctttccactcgctagccccgccgggggtccgtgtcctgtctcggtggccggacccgggcccgagcccgagcagtagccggcgccatgtcggtggtgggcatagacctgggcttccagagctgctacgtcgctgtggcccgcgccggcggcatcgagactatcgctaatgagtatagcgaccgctgcacgccggcttgcatttcttttggtcctaagaatcgttcaattggagcagcagctaaaagccaggtaatttctaatgcaaagaacacagtccaaggatttaaaagattccatggccgagcattctctgatccatttgtggaggcagaaaaatctaaccttgcatatgatattgtgcagttgcctacaggattaacaggtataaaggtgacatatatggaggaagagcagaatggaccagtggatggacaaggagacaacccaggcccccaggctgctgagcagggtacagacacagctgtgccttcggattcagacaagaagcttcctgaaatggacattgattgattccaacacttgtttctattaaaacagactattataaagctttaagttgtcaactttgttctaaatatcaactagcgcaagtgaatactgaagatttcttagtcagtttttaggggattttcggggaggggaaataggtaatgtatggagcattttcacttctaaatagttagatacagaaattaagtgcattgtatctttttcataatggtactatttagaagcccagttagtcttactgagcttatgcttcactcctttatgtttaaccatgtgtctacaagaataagtttgttttggaaagttgagctatagctacagctctagctatccagcagacttttcattatgacttacatggcaggagctctaattatgctttaaaaatctgttgtggagattgctttaaatgctccctgcctggtgtggggatggggtccccctctttgtgagggctggagcatggcacggcatggattaacacggcagaggaacaaaggtgtgctctgagcttcttcatatttcaccttcaccctcacctgtgttctcttccctctctcccaataaaagggctcccatta

SEQ ID NO: 14846 - DNA, 5051 bp, Homo sapiens
ggaattcagaggcagagctttcagatgattcttttgaaaattcagacaaaacagctagacaatctaaaaaagagatgaagaagaaagatacagtgccttggtggataactgaagatgattttaaagatgatgttatctactgaactccgggttattcctcctcattcctcaaagattttagctgctgtttcactgacttcttggaacaaatgtgagctatttgaaaacaaagaagacttctcagcctgttatggaaatagaagaggagtctgctgaaaagattcaatttcttaagagcagtggaacctctctcttaagtactgatagcttagaaacaaatgaactagtagtttctgagctcaaccatagtagtctcggagtgggattggacacattagaagaacaagaggagaaagaacaattttttgccaggcttgagaaaggcttgacatcttccattgattattcgagattaaataaggaattggattctaatgactctacacattttaaagctttacatattaatcaagccaacgcagaactaactgatgacgaacatgagaatgaatcgaaacatgaagaactggcagaaaattacagtgatgattttgaagatgagtatgttggtgcaccgttgactactaaagatgaagagatgccttccaaagagaattccaaatcagaaaaaataagtgtgcccaaacaggaagaagaaaaaactggcatgcttgctaatgttgtgctgcttgattcattagactctgttgcagaggtcaatcttgatgaacaagataaaataacacctaagccaaggtgcctaccagaaatgactgagaatgaaatgacaggaacaggtgtttcttatggacaaagcagtagtgacgttgaagccctacatcaagcttattgtcatatagcccattcattgggagatgaagacaaacaaaaaattgagagtaacacagtggaagatatcaagagctcagtgaaaggtcatcctcaagaaaatgaagagaattcaaaaaacatctctactatggaatctgatctgcccacagtagaggagctgatgaaacctatcagaatagattcctttgggatcagtggttttgatttacaacctgtcagctctgagaaagtggccgaaagaaaagaaactgaattttttagctctttacccctgaagatgaacccaaatattttgtctcaagactcacaacatgtgaaccttttttttgacaaaaatgatgagaatgtgattttacaaaagaccacaaatgagagtatggaaaacagctgtccacaagtaactgaagtaactgccacagaagaacatgttgataaaatgtaccttaatattttgaggaaaaaaataactgttaattcttcatcattatctcaggatgacaaaattaataaaacttacagatctcaacttagttctgaagaagaaggggctgtaatgggtaaacaggtaccatacaagaaggccagaagtgcacctcctttacttaaaaggaaaccccagagtggattatatgcgtcagttaggagctcaggctatggcaaacccagttcaccactcaagatgttttctactcttgaaaagaaaacttcagaggacattataaaaagcaaaaacttgagatcgatttctacctccaatcaacctaggaaaaaagaaatcttatctggaacaaaactcatcaagcctgcagctttggataaaccagctcacaaaactgaaagttgcctgtctactcgtaagaagtctgaaaatcccacagaaactgattcctgtattcagtttcagactgattccttaggatactgtggtgagaacaaggagaagaaattacttatgtttaaaagagttcaggaagcagaggataaatggaggggtgcgcaagccctaattgagcaaattaaagccacattctcagaaaaggagaaagaactagaaaataagttggaagaactaaagaaacaacaggaaaaagaactcttcaaattgaatcaagataattatattcttcaagccaagttaagcagctttgaagaaacaaacaaaaaacaaaggtggttacattttggagaagcagctgatcctgtcactggagaaaagttgaagcaaatccaaaaagaaatacaagaacaagagacacttcttcaaggatatcaacaggaaaatgaacgattatataatcaagtaaaagatctccaagaacaaaacaagaaaaatgaggagcgaatgtttaaggaaaaccaaagtttattcagtgaggtagcttccttaaaagaacagatgcacaaaagtcgttttctgtctcaagtagttgaagattcagagcccacaagaaatcagaattttacagatctgttagcagaactacggatggcacagaaagaaaaagacagtttattggaagacatcaaaagactgaaacaagacaaacaagctcttgaagtagacttcgaaaaaatgaagaaagagagggaccaagccaaagatcagattgcttatgtcacaggtgagaaattatatgaaataaaaattttagaagaaacacataaacaagaaatcagtcgtctgcaaaaaagattacagtggtatgctgaaaatcaggaacttctggataaagatgcacttcggcttagagaagcaaatgaggaaattgagaagctcaaacttgagattgagaaactgaaagctgaatctgggaatccatctattcggcagaagatacgcttaaaagataaagcagcagatgccaaaaaaattcaggatctggagcgacaagttaaggaaatggaagggattctgaagagaagatatcccaattctttacctgctttaatattggctgcatcagcagctggtgatacagtggataaaaatacagtggaatttatggagaaaaggataaaaaagctagaagctgatctggagggcaaagatgaagatgcaaagaaaagccttcgtaccatggaacaacagtttcagaaaatgaagattcagtatgaacaaagactagagcagcaggagcagctacttgcctgcaaattgaatcaacatgactctcccagaattaaagccctagagaaggaacttgatgacatcaaggaagcccatcagatcactgtaagaaaccttgaagccgaaatagacgttcttaaacatcagaatgctgaattagacgtcaagaaaaatgataaagatgatgaagattttcagtctatagaattccaggtggaacaggctcatgctaaagctaaattagtaagactcaatgaagaactggctgcaaaaaagagagaaatacaagacctctcaaaaactgtggagaggcttcagaaagacagaagaatgatgctatcaaatcagaactcaaagggcagagaggaaatgtctgccaaaagggcaaagaaagatgttttgcactcaagtaaaggaaatgctaactccttccctggaaccctggacagcaagctgtaccaaccacatactttcactgattcccatgtttcagaagttttacaagaaaactacagattaaaaaatgagctagaaggattaatttcagagaagaatgaactgaagatgaaatctgaagcagtgatgaatcaatttgaaaactccatgagaagggtcaaggaagatactgcagcacacattgcatccctcaaagcatctcatcagagagaaatagagaaactcctttgccaaaatgcagtagaaaattcttcttccaaagtagctgaactaaatcgtaaaatagcaactcaagaggtacttataagacatttccaaagtcaagttaatgagctgcagagtaaacaagagtctctcgtagtttctgaagttcgagaagaaattctacagaaagagattacaaaactcttagaagaattgagagaagccaaagaaaaccatacaccagagatgaaacatttcgtgggcttagaaaagaaaattaagcagatggaaatgagacatgcacaaagagaacaggaacttcaacagataatacagcaaacacaccaagtagtagaaactgagcaaaacaaagaagttgaaaaatggaaaagactggcacagttaaagaatcgtgagctggagaagttccgcacagaactagactcaatattagatgttctccgagagctgcaccggcaaggagtggttgtgccagttgcttttgcagatgaaatgaatgcaccagagtattaatagaaattcagatttcataatgaccttattaaaaggcctgaagatggatgggattgtgccactgtcaggacagcttatgaaaaacaagtgttccaatatgtttccagaaagcaaacaaccaaagcaacatttcaaaataaattgcctttaaccaataagaaaaaaaacatataatggtgtattttactaaaaatcattaaccagtctcattttaagtgatttatggacagtttcctttatagcagagaagggctcacttgtatgctagaaatagaaagaaaagaaaattgaacatactccgccacatttttattgataatgtgaggtttttaaaatttttattttagatccagggggtacatgtgcttgttgtaacatgggtgtattgaataatggtgggaattgggcttctagtgtacccatcatccaaatattaaacactgtacccaacaggtaatttttcaacgcttactgccgctcacactctttcccctattggagtccccagtgtctgttatctccatctttatgtctctgtgtacccattgtttagctcctacttttaagtgagaatatatgcaatattttattttttatgtctgatttagttcacataggataatggcctccagctctatccatgttgctgcaaatgacatgatttcattcttttttatagttgcataatactccatttatatatctctctctatatatatctcacgttttctttatccagtcaattgttggtagatacttaggttggttccatgaatttgctattgtaaatattgctgcaataaacatacatgtacag

SEQ ID NO: 14847 - DNA, 3579 bp, Homo sapiens
ctgaggcccacgcagggcctagggtgggaagatggcaggtgggggcggcgacctgagcaccaggaggctgaatgaatgtatttcaccagtagcaaatgagatgaaccatcttcctgcacacagccacgatttgcaaaggatgttcacggaagaccagggtgtagatgacaggctgctctatgacattgtattcaagcacttcaaaagaaataaggtggagatttcaaatgcaataaaaaagacatttccattcctcgagggcctccgtgatcgtgatctcatcacaaataaaatgtttgaagattctcaagattcttgtagaaacctggtccctgtacagagagtggtgtacaatgttcttagtgaactggagaagacatttaacctgccagttctggaagcactgttcagcgatgtcaacatgcaggaataccccgatttaattcacatttataaaggctttgaaaatgtaatccatgacaaattgcctctccaagaaagtgaagaagaagagagggaggagaggtctggcctccaactaagtcttgaacaaggaactggtgaaaactcttttcgaagcctgacttggccaccttcgggttccccatctcatgctggtacaaccccacctgaaaatggactctcagagcacccctgtgaaacagaacagataaatgcaaagagaaaagatacaaccagtgacaaagatgattcgctaggaagccaacaaacaaatgaacaatgtgctcaaaaggctgagccaacagagtcctgcgaacaaattgctgtccaagtgaataatggggatgctggaagggagatgccctgcccgttgccctgtgatgaagaaagcccagaggcagagctacacaaccatggaatccaaattaattcctgttctgtgcgactggtggatataaaaaaggaaaagccattttctaattcaaaagttgagtgccaagcccaagcaagaactcatcataaccaggcatctgacataatagtcatcagcagtgaggactctgaaggatccactgacgttgatgagcccttagaagtcttcatctcagcaccgagaagtgagcctgtgatcaataatgacaaccctttagaatcaaatgatgaaaaggagggccaagaagccacttgctcacgaccccagattgtaccagagcccatggatttcagaaaattatctacattcagagaaagttttaagaaaagagtgataggacaagaccacgacttttcagaatccagtgaggaggaggcgcccgcagaagcctcaagcggggcactgagaagcaagcatggtgagaaggctcctatgacttctagaagtacatctacttggagaatacccagcaggaagagacgtttcagcagtagtgacttttcagacctgagtaatggagaagagcttcaggaaacctgcagctcatccctaagaagagggtcaggatcacagccacaagaacctgaaaataagaagtgctcctgtgtcatgtgttttccaaaaggtgtgccaagaagccaagaagcaaggactgaaagtagtcaagcatctgacatgatggataccatggatgttgaaaacaattctactttggaaaaacacagtgggaaaagaagaaaaaagagaaggcatagatctaaagtaaatggtctccaaagagggagaaagaaagacagacctagaaaacatttaactctgaataacaaagtccaaaagaaaagatggcaacaaagaggaagaaaagccaacactagacctttgaaaagaagaagaaaaagaggtccaagaattcccaaagatgaaaatattaattttaaacaatctgaacttcctgtgacctgtggtgaggtgaagggcactctatataaggagcgattcaaacaaggaacctcaaagaagtgtatacagagtgaggataaaaagtggttcactcccagggaatttgaaattgaaggagaccgcggagcatccaagaactggaagctaagtatacgctgcggtggatataccctgaaagtcctgatggagaacaaatttctgccagaaccaccaagcacaagaaaaaagagaatactggaatctcacaacaataccttagttgacccttgtgaggagcataagaagaagaacccagatgcttcagtcaagttctcagagtttttaaagaagtgctcagagacatggaagaccatttttgctaaagagaaaggaaaatttgaagatatggcaaaggcggacaaggcccattatgaaagagaaatgaaaacctatatccctcctaaaggggagaaaaaaaagaagttcaaggatcccaatgcacccaagaggcctcctttggcctttttcctgttctgctctgagtatcgcccaaaaatcaaaggagaacatcctggcctgtccattgatgatgttgtgaagaaactggcagggatgtggaataacaccgctgcagctgacaagcagttttatgaaaagaaggctgcaaagctgaaggaaaaatacaaaaaggatattgctgcatatcgagctaaaggaaagcctaattcagcaaaaaagagagttgtcaaggctgaaaaaagcaagaaaaagaaggaagaggaagaagatgaagaggatgaacaagaggaggaaaatgaagaagatgatgataaataagttgcttctagtgcagtttttttcttgtctataaagcatttaagctgcctgtacacaactcactccttttaaagaaaaaaacttcaacgtaagactgtgtaagatttgtttttaaaccgtacactgtgtttttttgtatagttaaccactaccgaatgtgtcttcagatagccctgtcctggtggtatttagccactaacctttgcctggtacagtatgggggttgtaaattggcatggaaatttaaagcaggttcttgttagtgcacagcacaaattagttgtataggaggatggtagttttttcaccttcagttgtctctgatgtagcttatacaaaacatttgttgttctgttaactgaatgccactctgtaattgcaaaaaaaaaaaacagttgcagctgttttgttgacattctgaatgcttctaagtaaatacaatttttaaaaaaccgtatgagggaactgtgtagacaaggtaccaggtcagtcttcttccatgttctattagctccacaaagccaatctcaatccctcaaaacaatcttgtcatacttgaaaatatgacactctagtcaaagccttggtaaaataatcagtgtttccaatctgtcctgttacaaaagaaacagattattattgaacttatgcaaataaccattgtcataagaatgtttatgaatagtttccaaattatggcaaattcatgtagagagagaaaagtaactgttttggttttgctcacaaaagtctactttacctaagggctgtcagatataagtaacttaaaagaaagagaagttttcttgacttttgaaaacaaaatatgaaaagaatcggcaatgtttcaaacaaaaagtcataaaagtcactttattcctccatcaaaaaaaaaaaaaaaaaaaaaa

SEQ ID NO: 14848 - DNA, 2301 bp, Homo sapiens
agcagagcggacgggcgcgcgggaggcgcgcagagctttcgggctgcaggcgctcgctgccgctggggaattgggctgtgggcgaggcggtccgggctggcctttatcgctcgctgggcccatcgtttgaaactttatcagcgagtcgccactcgtcgcaggaccgagcggggggcgggggcgcggcgaggcggcggccgtgacgaggcgctcccggagctgagcgcttctgctctgggcacgcatggcgcccgcacacggagtctgacctgatgcagacgcaagggggttaatatgaacgcccctctcggtggaatctggctctggctccctctgctcttgacctggctcacccccgaggtcaactcttcatggtggtacatgagagctacaggtggctcctccagggtgatgtgcgataatgtgccaggcctggtgagcagccagcggcagctgtgtcaccgacatccagatgtgatgcgtgccattagccagggcgtggccgagtggacagcagaatgccagcaccagttccgccagcaccgctggaattgcaacaccctggacagggatcacagcctttttggcagggtcctactccgaagtagtcgggaatctgcctttgtttatgccatctcctcagctggagttgtatttgccatcaccagggcctgtagccaaggagaagtaaaatcctgttcctgtgatccaaagaagatgggaagcgccaaggacagcaaaggcatttttgattggggtggctgcagtgataacattgactatgggatcaaatttgcccgcgcatttgtggatgcaaaggaaaggaaaggaaaggatgccagagccctgatgaatcttcacaacaacagagctggcaggaaggctgtaaagcggttcttgaaacaagagtgcaagtgccacggggtgagcggctcatgtactctcaggacatgctggctggccatggccgacttcaggaaaacgggcgattatctctggaggaagtacaatggggccatccaggtggtcatgaaccaggatggcacaggtttcactgtggctaacgagaggtttaagaagccaacgaaaaatgacctcgtgtattttgagaattctccagactactgtatcagggaccgagaggcaggctccctgggtacagcaggccgtgtgtgcaacctgacttcccggggcatggacagctgtgaagtcatgtgctgtgggagaggctacgacacctcccatgtcacccggatgaccaagtgtgggtgtaagttccactggtgctgcgccgtgcgctgtcaggactgcctggaagctctggatgtgcacacatgcaaggcccccaagaacgctgactggacaaccgctacatgaccccagcaggcgtcaccatccaccttcccttctacaaggactccattggatctgcaagaacactggacctttgggttctttctggggggatatttcctaaggcatgtggcctttatctcaacggaagccccctcttcctccctgggggccccaggatggggggccacacgctgcacctaaagcctaccctattctatccatctcctggtgttctgcagtcatctcccctcctggcgagttctctttggaaatagcatgacaggctgttcagccgggagggtggtgggcccagaccactgtctccacccaccttgacgtttcttctttctagagcagttggccaagcagaaaaaaaagtgtctcaaaggagctttctcaatgtcttcccacaaatggtcccaattaagaaattccatacttctctcagatggaacagtaaagaaagcagaatcaactgcccctgacttaactttaacttttgaaaagaccaagacttttgtctgtacaagtggttttacagctaccacccttagggtaattggtaattacctggagaagaatggctttcaatacccttttaagtttaaaatgtgtatttttcaaggcatttattgccatattaaaatctgatgtaacaaggtggggacgtgtgtcctttggtactatggtgtgttgtatctttgtaagagcaaaagcctcagaaagggattgctttgcattactgtccccttgatataaaaaatctttagggaatgagagttccttctcacttagaatctgaagggaattaaaaagaagatgaatggtctggcaatattctgtaactattgggtgaatatggtggaaaataatttagtggatggaatatcagaagtatatctgtacagatcaagaaaaaaaggaagaataaaattcctatatcat

SEQ ID NO: 14849 - DNA, 3262 bp, Homo sapiens
ggctggagagtaaaaagaactgggggtaagagcccctctgcctagcactgctcccccaaggctcccagaaatctcaggtcagaggcacggacagcctctggagctctcgtctggtgggaccatgaactgccagcagctgtggctgggcttcctactccccatgacagtctcaggccgggtcctggggcttgcagaggtggcgcccgtggactacctgtcacaatatgggtacctacagaagcctctagaaggatctaataacttcaagccagaagatatcaccgaggctctgagagcttttcaggaagcatctgaacttccagtctcaggtcagctggatgatgccacaagggcccgcatgaggcagcctcgttgtggcctagaggatcccttcaaccagaagacccttaaatacctgttgctgggccgctggagaaagaagcacctgactttccgcatcttgaacctgccctccacccttccaccccacacagcccgggcagccctgcgtcaagccttccaggactggagcaatgtggctcccttgaccttccaagaggtgcaggctggtgcggctgacatccgcctctccttccatggccgccaaagctcgtactgttccaatacttttgatgggcctgggagagtcctggcccatgccgacatcccagagctgggcagtgtgcacttcgacgaagacgagttctggactgaggggacctaccgtggggtgaacctgcgcatcattgcagcccatgaagtgggccatgctctggggcttgggcactcccgatattcccaggccctcatggccccagtctacgagggctaccggccccactttaagctgcacccagatgatgtggcagggatccaggctctctatggcaagaagagtccagtgataagggatgaggaagaagaagagacagagctgcccactgtgcccccagtgcccacagaacccagtcccatgccagacccttgcagtagtgaactggatgccatgatgctggggccccgtgggaagacctatgctttcaagggggactatgtgtggactgtatcagattcaggaccgggccccttgttccgagtgtctgccctttgggaggggctccccggaaacctggatgctgctgtctactcgcctcgaacacaatggattcacttctttaagggagacaaggtgtggcgctacattaatttcaagatgtctcctggcttccccaagaagctgaatagggtagaacctaacctggatgcagctctctattggcctctcaaccaaaaggtgttcctctttaagggctccgggtactggcagtgggacgagctagcccgaactgacttcagcagctaccccaaaccaatcaagggtttgtttacgggagtgccaaaccagccctcggctgctatgagttggcaagatggccgagtctacttcttcaagggcaaagtctactggcgcctcaaccagcagcttcgagtagagaaaggctatcccagaaatatttcccacaactggatgcactgtcgtccccggactatagacactaccccatcaggtgggaataccactccctcaggtacgggcataaccttggataccactctctcagccacagaaaccacgtttgaatactgactgctcacccacagacacaatcttggacattaacccctgaggctccaccacccaccctttcatttcccccccagaagcctaaggcctaatagctgaatgaaatacctgtctgctcagtagaaccttgcaggtgctgtagcaggcgcaagaccgtagatctcaggcctctaacacttccaactccagccaccactttcctgtgcattttcactcctgagaagtgctcccctaactcagatcccctaacttagatttggcccccaactccatttcctgtctgtcttagacagcccttccaactgtgtcatctcttctctggaggtcaatggtggagggagatgcctgggtcctgttcttcctacataaaatgcaagaaaacagcatggccagtaaactgagcaagggccttggaatccttgagaatcacatttatgtgcttatgattacgggcaagctaattaaccttgttgaatctcagattccccatttgcaacattaggttaagaccagtactgcaggattgttgcactaaatgaaatactgtatgtgaagtgcctggcacagtgtctggtacatttgtgtttaataaaagctaactccatgttcataagagaggactgaacagctcttcctctagctgtctggctgtataactcttacagtagtctgtataataagggcatctctattagatctttaggggacagaggatttgtcaagatggttagctctttgttttggggtgcagagaaagaaaagagcagcaacagcagaggctggactccctggttcagtatttaatgccattttattcacatgctcccatgttctccctccctcccattgtagccttgctgcccaggggagggatatgtcttcctttatgcatctgggaaaccaggaacagaccctgcgcaggagagtcagagggggaagagttagaatgggtcagtggctggaacaaagttctggttaaggaggaaattagtgccacccacggtgagaagcagagaaggcacttgcatcctatgcagccctgaagaccaggctcctttgggcaaaaggcaagactctggcaggtgggtcaatgctctctccttggagcaagaagccagcttttggggaaggcaggtcctgaggcaggcactgccctgtggtcttccccaggttgaggagagaagtggaagccccatggaagacagtgctcccagctgaggtaggaggcggaggtgggggtgggggtagtttaagcctatggggcccagggggaaaggccaaacagaaacccaactaccccctaatgaagggcctggaggttggggtatcttggagctcctcagagcccttcttcccatcaaaaaggtatcaaatgccttggaagctccctgatcctacaaaacaaaaaaatgcttatttttaccactgtgaggcaagctgaggtgaacatttaaaaggctatttcaagacgaggtgcggtggctataatcctagcactttgggaggctgaagcaggaggatcacttgagcccaggagttcaagaccagcttgggcaacatagggagaccctgtctctgcaaaaaaataaaaacgaatacataaaaattaaaaaaaaa

SEQ ID NO: 14850 - DNA, 1908 bp, Homo sapiens
accggctcagacggtcgccgccgcgtttgcgcagggggagctggtcgccgccgcggccgcctggaattgtgggagttgtgtctgccactcggctgccggaggccgaaggtccctgactatggctccccagagcctgccttcatctaggatggctcctctgggcatgctgcttgggctgctgatggccgcctgcttcaccttctgcctcagtcatcagaacctgaaggagtttgccctgaccaacccagagaagagcagcaccaaagaaacagagagaaaagaaaccaaagccgaggaggagctggatgccgaagtcctggaggtgttccacccgacgcatgagtggcaggcccttcagccagggcaggctgtccctgcaggatcccacgtacggctgaatcttcagactggggaaagagaggcaaaactccaatatgaggacaagttccgaaataatttgaaaggcaaaaggctggatatcaacaccaacacctacacatctcaggatctcaagagtgcactggcaaaattcaaggagggggcagagatggagagttcaaaggaagacaaggcaaggcaggctgaggtaaagcggctcttccgccccattgaggaactgaagaaagactttgatgagctgaatgttgtcattgagactgacatgcagatcatggtacggctgatcaacaagttcaatagttccagctccagtttggaagagaagattgctgcgctctttgatcttgaatattatgtccatcagatggacaatgcgcaggacctgctttcctttggtggtcttcaagtggtgatcaatgggctgaacagcacagagcccctcgtgaaggagtatgctgcgtttgtgctgggcgctgccttttccagcaaccccaaggtccaggtggaggccatcgaagggggagccctgcagaagctgctggtcatcctggccacggagcagccgctcactgcaaagaagaaggtcctgtttgcactgtgctccctgctgcgccacttcccctatgcccagcggcagttcctgaagctcggggggctgcaggtcctgaggaccctggtgcaggagaagggcacggaggtgctcgccgtgcgcgtggtcacactgctctacgacctggtcacggagaagatgttcgccgaggaggaggctgagctgacccaggagatgtccccagagaagctgcagcagtatcgccaggtacacctcctgccaggcctgtgggaacagggctggtgcgagatcacggcccacctcctggcgctgcccgagcatgatgcccgtgagaaggtgctgcagacactgggcgtcctcctgaccacctgccgggaccgctaccgtcaggacccccagctcggcaggacactggccagcctgcaggctgagtaccaggtgctggccagcctggagctgcaggatggtgaggacgagggctacttccaggagctgctgggctctgtcaacagcttgctgaaggagctgagatgaggccccacaccaggactggactgggatgccgctagtgaggctgaggggtgccagcgtgggtgggcttctcaggcaggaggacatcttggcagtgctggcttggccattaaatggaaacctgaaggccatcctctttctgctgtgtgtctgtgtagactgggcacagccctgtggccggggggtcaggtgagtggttgggtgatgggctctgctgacgtgcagggctcagcccagggcatccaggaacaggctccagggcaggaacctgggcccaggagttgcaagtctctgcttcttaccaagcagcagctctgtaccttgggaagtcgcttaattgctctgagcttgtttcctcatctgtcaggagtgccattaaaggagaaaaatcacgtagaaaaaaaaaa

SEQ ID NO: 14851 - DNA, 4361 bp, Homo sapiens
cacatttcttagcttctctgagcctccatttcagcatctgtaaaatgttactacctactttataggttttctgatgaggcttaagtgtggttgtgcatgtgaccatcttagcatagtgtgtggcaatggtaagcactcagtgctgtcagctgtttttaccgctgttattatattactgtgttttcccatgtcattaggtctgtgatccaggcttcagcagacaatccaggctgatgcttttgctgagtgcactaagggatgctggcctggcgggatggtgaactggaagcagaaacgtcatcctctctcttccttcttgccatgcaggtgtggatgtgtgggggccgcatggaggacatcccctgctccagggtgggccatatctacaggaagtatgtgccctacaaggtcccggccggagtcagcctggcccggaaccttaagcgggtggccgaagtgtggatggatgagtacgcagagtacatttaccagcgccggcctgaataccgccacctctccgctggggatgtcgcagtccagaaaaagctccgcagctcccttaactgcaagagtttcaagtggtttatgacgaagatagcctgggacctgcccaaattctacccacccgtggagcccccggctgcagcttggggggagatccgaaatgtgggcacagggctgtgtgcagacacaaagcacggggccttgggctccccactaaggctagagggctgcgtccgaggccgtggggaggctgcctggaacaacatgcaggtattcaccttcacctggagagaggacatccggcctggagacccccagcacaccaagaagttctgctttgatgccatttcccacaccagccctgtcacgctgtacgactgccacagcatgaagggcaaccagctgtggaaataccgcaaagacaagaccctgtaccaccctgtcagtggcagctgcatggactgcagtgaaagtgaccataggatcttcatgaacacctgcaacccatcctctctcacccagcagtggctgtttgaacacaccaactcaacagtcttggaaaaattcaataggaactgagccctcatgtccccttggcaggccccccagggtctggcactcactgcagacttcctctttcaagggaggcagggcccctgtgggcactaggtgtaaaaggtgctggccaaatggttcagggtgaagagggctcttgattcaggggctggggtctgcctggtccttgagcccctgagttgtgggggtagggtgaagagcatatcccacaagaggccccacagggagcagagactgctttaatccctgctgacatcacggaaaagcaacagagccttttcaactttgtcactatgtccccttgaacattatgtgggagaacaccaaggtagcctaggccacccaaaagtgagtcctgcgaggttgcccagccctcagatggctctcctacatgatggtgctttagaaacaaaggtaaaatttgcctgtttggggcagcttttagtatcgatgccactcatctgcagcagaagagaaagaagtcctcttggggctttttagtttctgccgtcctggggggaacattgcagttactgcacagcttctgttctctgtcacaaccccaggtgatttggtccggtcaaaggccatacttggggccctaagagtgttcagtattgaatgctgatcagctgccaggtgaggagtcagaagagggagcccccctagacatttctttgcagctatggacatgcgggatatctccccctgctctctgggtatttgaaatgtcaattttagcactctccaggcacaaggacagcccagcaccagctttacagggcagtgtttcagatggccctgagcccacggaaaaggccaggtagacctccaaactagaaatgctggctgatttgccctgatccatgcttccatttccctgtctctcttccccaggcaattactggcctcaaaagaggaacagaggtgctgcgaggtgctcacctcacagagtctggaggcctccaggatcaactgtgggcaaagtgcctgcctctgacctcatcatggttctagttctcatacagaactccagaatttttaaagaactctataattggattgcaaactaggatgctacataggattctggtattccacatccaatatggatttctagaatgctgtgattaaaggagccagccaggtgtaatacagtcaaggcagcccccagcctagagacaatctgtgaaatccaaagttggtggtgttgggaaagcagggggacatgtgtccctcagctcagcagaggctgtggtacaacatggtccttggtgaagacctgcacccctggaacctcccaccatcatcacaactgtagtctcatttgcagtggagaaaagaacccgacgtcccacagccagatatacacccagctccatgccagcccttcatgtttaccttttgctttgttaattacatgtcagactcctagagggcctccagactaataggaagcatttctgtaaccaacctgccacccactgattcagaaatggaaatcacattccacaatctatggcttccaccagctagcccaggaaatacttgaaatcagcattccaattagtgttgagtctcttgattgtgtcatttaccaattaaataactgagacctaagtctgggaacagagccacgaatctgcctttgagatgctggcagatctcaaggccatcaattattgggggagggagggacaaacactcccaatcatccaccagtcagactgaatgtgtagctggcgaggaattacttccacttctggcccagcacaagccctgctttggccacctgtctgcaagagaggcggcccctgtgcttgcaacgcttacgtgttgatcccagtgtccttttccaaatgagtgctgtagctttagaagtggccctctatagaaagaagtcaaaagatgaggccccttctagaatctaggataacaagagtgttgacagtttgaggagtcgaattgagattcatcatcaaagagcaatgcagcgtcgttaaaataaaaactgtgccttttaaaaagaaaaatgcaaatatagagcaaatccctaaacttgaaccatttcctagtgccttgctagacaaacataaaggggcagggttgtggggaggggaacgtttttggtggtgtgtgcagttcctactggatgagtgtgtgtttcttaatgtctcatttcaagcaggagatgttgggtctggagcaagatctgagactgagatgtcccccaagggtgacaggtcagatttatttcagtcagtgcaagtcacactccaaactaaaggctgggcagtgcgtttagtctgtggcctagaagacctcatcagcccccgagaggaggccttgcattacctcactgggacctgtttgggggccatccctgcggtccaccctctgaacccccagcatgtttgtcctgtttctcaccattgggttaaggggtgccgagcactagctagacttccacatagtcccaccccaagtgggcggcagtgttcctggcatgaccaggattcctgtgaaagcaggagcagcagcaagccgtcccgggcctgcctttcccatcctttggttctcctttccagtctgggttcacaccctgaaaagggatgggtgtgtcctctgagcactctggcatttgtcattgctgagcccatatcagtaggtcctgggacttgacaaagtatgtgggaggggaaggaaggacagaacttgactggctccatttcatggaccaactgatcaattgccagtactaagccactcattgttatggcttcctttttgaaaaccacctgtctcaaggattcaggtttctgctcacatccccagctgatgctcaataaaactcagccaggagcatatggagatgctgacagccaggtaatgggtgagactgtggggtcccttttcctctaaagcctttactctgaggataaggtcacaaagtagggtgtgacttgaaagtatcgtgaccatgtggcccaccagcagcctttccaaaggggaactccagagacatttcataatgcaaacagcactgttgctttaagaacaaggcctttggaggtggctaaacttgcacgcacgtgtgtgaaaagccatcccatcttctgcctccagttggagctttcagctgttaaaacagtcagaaactattgattcttccctttaggaaaaaatgctcaggcagaacggggtacatccacaggaggaatcggacgagaggatgtgacattcggtccaggagagaaagagcagtttctgttaaagatgta

SEQ ID NO: 14852 - DNA, 5222 bp, Homo sapiens
gttggagcggggccggcgccgcagccgcttctgctggctgagctgctgccgccgccgggcggacgggcggacgcgcggagctgggggcggcgcggcggggccggcggggcgcggcggggctgaccggccccgatgaggcggaaggagaagcggctcctgcaggcggtggcgctggtgctggcggccctggtcctcctgcccaacgtggggctttgggcgctgtaccgcgagcggcagcccgacggcacccctgggggatcgggggcggcggtggcgccggcggcgggacagggctcacacagtcgacaaaagaaaacgtttttcttgggagatgggcagaagctgaaggactggcatgacaaggaggccatccggagggacgctcagcgcgtaggaaatggagaacaaggaagaccttaccccatgaccgatgctgagagagtggatcaggcataccgagaaaatggatttaacatctacgtcagtgataaaatctccttgaatcgctctctcccagatatccggcacccaaactgcaacagcaagcgctacctggagacacttcccaacacaagcatcatcatccccttccacaacgagggctggtcctccctcctccgcaccgtccacagtgtgctcaatcgctcgcctccagagctggtcgccgagattgtactggtcgacgacttcagtgatcgagagcacctgaagaagcctcttgaagactacatggcccttttccccagtgtgaggattcttcgaaccaagaaacgggaagggctgataaggacccgaatgctgggggcctcagtggcaactggggatgtcatcacattcttggattcacactgtgaagccaatgtcaactggcttccccccttgcttgaccgcattgctcggaaccgcaagaccattgtgtgcccgatgattgatgtaattgaccatgacgactttcggtacgagacacaggcaggggatgccatgcggggagcctttgactgggagatgtactacaagcggatcccgatccctccagaactgcagaaagctgaccccagcgacccatttgagtctcccgtgatggccggtggactgttcgccgtggatcggaagtggttctgggaactcggcgggtatgacccaggcttggagatctggggaggggagcagtatgaaatctccttcaaggtgtggatgtgtgggggccgcatggaggacatcccctgctccagggtgggccatatctacaggaagtatgtgccctacaaggtcccggccggagtcagcctggcccggaaccttaagcgggtggccgaagtgtggatggatgagtacgcagagtacatttaccagcgccggcctgaataccgccacctctccgctggggatgtcgcagtccagaaaaagctccgcagctcccttaactgcaagagtttcaagtggtttatgacgaagatagcctgggacctgcccaaattctacccacccgtggagcccccggctgcagcttggggggagatccgaaatgtgggcacagggctgtgtgcagacacaaagcacggggccttgggctccccactaaggctagagggctgcgtccgaggccgtggggaggctgcctggaacaacatgcaggtattcaccttcacctggagagaggacatccggcctggagacccccagcacaccaagaagttctgctttgatgccatttcccacaccagccctgtcacgctgtacgactgccacagcatgaagggcaaccagctgtggaaataccgcaaagacaagaccctgtaccaccctgtcagtggcagctgcatggactgcagtgaaagtgaccataggatcttcatgaacacctgcaacccatcctctctcacccagcagtggctgtttgaacacaccaactcaacagtcttggaaaaattcaataggaactgagccctcatgtccccttggcaggccccccagggtctggcactcactgcagacttcctctttcaagggaggcagggcccctgtgggcactaggtgtaaaaggtgctggccaaatggttcagggtgaagagggctcttgattcaggggctggggtctgcctggtccttgagcccctgagttgtgggggtagggtgaagagcatatcccacaagaggccccacagggagcagagactgctttaatccctgctgacatcacggaaaagcaacagagccttttcaactttgtcactatgtccccttgaacattatgtgggagaacaccaaggtagcctaggccacccaaaagtgagtcctgcgaggttgcccagccctcagatggctctcctacatgatggtgctttagaaacaaaggtaaaatttgcctgtttggggcagcttttagtatcgatgccactcatctgcagcagaagagaaagaagtcctcttggggctttttagtttctgccgtcctggggggaacattgcagttactgcacagcttctgttctctgtcacaaccccaggtgatttggtccggtcaaaggccatacttggggccctaagagtgttcagtattgaatgctgatcagctgccaggtgaggagtcagaagagggagcccccctagacatttctttgcagctatggacatgcgggatatctccccctgctctctgggtatttgaaatgtcaattttagcactctccaggcacaaggacagcccagcaccagctttacagggcagtgtttcagatggccctgagcccacggaaaaggccaggtagacctccaaactagaaatgctggctgatttgccctgatccatgcttccatttccctgtctctcttccccaggcaattactggcctcaaaagaggaacagaggtgctgcgaggtgctcacctcacagagtctggaggcctccaggatcaactgtgggcaaagtgcctgcctctgacctcatcatggttctagttctcatacagaactccagaatttttaaagaactctataattggattgcaaactaggatgctacataggattctggtattccacatccaatatggatttctagaatgctgtgattaaaggagccagccaggtgtaatacagtcaaggcagcccccagcctagagacaatctgtgaaatccaaagttggtggtgttgggaaagcagggggacatgtgtccctcagctcagcagaggctgtggtacaacatggtccttggtgaagacctgcacccctggaacctcccaccatcatcacaactgtagtctcatttgcagtggagaaaagaacccgacgtcccacagccagatatacacccagctccatgccagcccttcatgtttaccttttgctttgttaattacatgtcagactcctagagggcctccagactaataggaagcatttctgtaaccaacctgccacccactgattcagaaatggaaatcacattccacaatctatggcttccaccagctagcccaggaaatacttgaaatcagcattccaattagtgttgagtctcttgattgtgtcatttaccaattaaataactgagacctaagtctgggaacagagccacgaatctgcctttgagatgctggcagatctcaaggccatcaattattgggggagggagggacaaacactcccaatcatccaccagtcagactgaatgtgtagctggcgaggaattacttccacttctggcccagcacaagccctgctttggccacctgtctgcaagagaggcggcccctgtgcttgcaacgcttacgtgttgatcccagtgtccttttccaaatgagtgctgtagctttagaagtggccctctatagaaagaagtcaaaagatgaggccccttctagaatctaggataacaagagtgttgacagtttgaggagtcgaattgagattcatcatcaaagagcaatgcagcgtcgttaaaataaaaactgtgccttttaaaaagaaaaatgcaaatatagagcaaatccctaaacttgaaccatttcctagtgccttgctagacaaacataaaggggcagggttgtggggaggggaacgtttttggtggtgtgtgcagttcctactggatgagtgtgtgtttcttaatgtctcatttcaagcaggagatgttgggtctggagcaagatctgagactgagatgtcccccaagggtgacaggtcagatttatttcagtcagtgcaagtcacactccaaactaaaggctgggcagtgcgtttagtctgtggcctagaagacctcatcagcccccgagaggaggccttgcattacctcactgggacctgtttgggggccatccctgcggtccaccctctgaacccccagcatgtttgtcctgtttctcaccattgggttaaggggtgccgagcactagctagacttccacatagtcccaccccaagtgggcggcagtgttcctggcatgaccaggattcctgtgaaagcaggagcagcagcaagccgtcccgggcctgcctttcccatcctttggttctcctttccagtctgggttcacaccctgaaaagggatgggtgtgtcctctgagcactctggcatttgtcattgctgagcccatatcagtaggtcctgggacttgacaaagtatgtgggaggggaaggaaggacagaacttgactggctccatttcatggaccaactgatcaattgccagtactaagccactcattgttatggcttcctttttgaaaaccacctgtctcaaggattcaggtttctgctcacatccccagctgatgctcaataaaactcagccaggagcatatggagatgctgacagccaggtaatgggtgagactgtggggtcccttttcctctaaagcctttactctgaggataaggtcacaaagtagggtgtgacttgaaagtatcgtgaccatgtggcccaccagcagcctttccaaaggggaactccagagacatttcataatgcaaacagcactgttgctttaagaacaaggcctttggaggtggctaaacttgcacgcacgtgtgtgaaaagccatcccatcttctgcctccagttggagctttcagctgttaaaacagtcagaaactattgattcttccctttaggaaaaaatgctcaggcagaacggggtacatccacaggaggaatcggacgagaggatgtgacattcggtccaggagagaaagagcagtttctgttaaagatgta

SEQ ID NO: 14853 - DNA, 2219 bp, Homo sapiens
gacccgaggccccggtccaatatggcgacctccacgggtcgctggcttctcctccggcttgcactattcggcttcctctgggaagcgtccggcggcctcgactcgggggcctcccgcgacgacgacttgctactgccctatccacgcgcgcgcgcgcgcctcccccgggactgcacacgggtgcgcgccggcaaccgcgagcacgagagttggcctccgcctcccgcgactcccggcgccggcggtctggccgtgcgcaccttcgtgtcgcacttcagggaccgcgcggtggccggccacctgacgcgggccgttgagcccctgcgcaccttctcggtgctggagcccggtggacccggcggctgcgcggcgagacgacgcgccaccgtggaggagacggcgcgggcggccgactgccgtgtcgcccagaacggcggcttcttccgcatgaactcgggcgagtgcctggggaacgtggtgagcgacgagcggcgggtgagcagctccggggggctgcagaacgcgcagttcgggatccgccgcgacgggaccctggtcaccgggtacctgtctgaggaggaggtgctggacactgagaacccatttgtgcagctgctgagtggggtcgtgtggctgattcgtaatggaagcatctacatcaacgagagccaagccacagagtgtgacgagacacaggagacaggttcctttagcaaatttgtgaatgtgatatcagccaggacggccattggccacgaccggaaagggcagctggtgctctttcatgcagacggccaaacggagcagcgtggcatcaacctgtgggaaatggcggagttcctgctgaaacaggacgtggtcaacgccatcaacctggatgggggtggctctgccacctttgtgctcaacgggaccttggccagttacccgtcagatcactgccaggacaacatgtggcgctgtccccgccaagtgtccaccgtggtgtgtgtgcacgaaccccgctgccagccgcctgactgccacggccacgggacctgcgtggacgggcactgccaatgcaccgggcacttctggcggggtcccggctgtgatgagctggactgtggcccctctaactgcagccagcacggactgtgcacggagaccggctgccgctgtgatgccggatggaccgggtccaactgcagtgaagagtgtccccttggctggcatgggccgggctgccagaggccttgtaagtgtgagcaccattgtccctgtgaccccaagactggcaactgcagcgtctccagagtaaagcagtgtctccagccacctgaagccaccctgagggcgggagaactctcctttttcaccaggaccgcctggctagccctcaccctggcgctggccttcctcctgctgatcagcactgcagcaaacctgtccttgctcctgtccagagcagagaggaaccggcgcctgcatggggactatgcataccacccgctgcaggagatgaacggggagcctctggccgcagagaaggagcagccagggggcgcccacaaccccttcaaggactgaagcctcaagctgcccggggtggcacgtcgcgaaagcttgtttccccacggtctggcttctgcaggggaaatttcaaggccactggcgtggaccatctgggtgtcctcagcccctgtggggcagccaagttcctgatagcacttgtgcctcagcccctcacctggccacctgccagggcacctgcaaccctagcaataccatgctcgctggagaggctcagctgcctgcttctggcctgcctgtgtctgctgccgagaagcccgtgcccccgggagggctgccgcactgccaaagagtctccctcctcctggggaaggggctgccaacgaaccagactcagtgaccacgtcatgacagaacagcacatcctggccagcacccctggctggagtgggttaaagggacgagtctgccttcctggctgtgacacgggaccccttttctacagacctcatcactggatttgccaactagaattcgatttcctgtcataggaagctccttggaagaagggatggggggatgagatcatgtttacagacctgttttgtcatcctgctgccaagaagttttttaatcacttgaataaattgatataataaaaggagccaccaggtggtgtgtggattctgaaaaaaaaaaaaaaaaaa

SEQ ID NO: 14854 - DNA, 3594 bp, Homo sapiens
gctgcaccgggcacgggtcggccgcaatccagcctgggcggagccggagttgcgagccgctgcctagaggccgaggagctcacagctatgggctggaggccccggagagctcgggggaccccgttgctgctgctgctactactgctgctgctctggccagtgccaggcgccggggtgcttcaaggacatatccctgggcagccagtcaccccgcactgggtcctggatggacaaccctggcgcaccgtcagcctggaggagccggtctcgaagccagacatggggctggtggccctggaggctgaaggccaggagctcctgcttgagctggagaagaaccacaggctgctggccccaggatacatagaaacccactacggcccagatgggcagccagtggtgctggcccccaaccacacggatcattgccactaccaagggcgagtaaggggcttccccgactcctgggtagtcctctgcacctgctctgggatgagtggcctgatcaccctcagcaggaatgccagctattatctgcgtccctggccaccccggggctccaaggacttctcaacccacgagatctttcggatggagcagctgctcacctggaaaggaacctgtggccacagggatcctgggaacaaagcgggcatgaccagccttcctggtggtccccagagcaggggcaggcgagaagcgcgcaggacccggaagtacctggaactgtacattgtggcagaccacaccctgttcttgactcggcaccgaaacttgaaccacaccaaacagcgtctcctggaagtcgccaactacgtggaccagcttctcaggactctggacattcaggtggcgctgaccggcctggaggtgtggaccgagcgggaccgcagccgcgtcacgcaggacgccaacgccacgctctgggccttcctgcagtggcgccgggggctgtgggcgcagcggccccacgactccgcgcagctgctcacgggccgcgccttccagggcgccacagtgggcctggcgcccgtcgagggcatgtgccgcgccgagagctcgggaggcgtgagcacggaccactcggagctccccatcggcgccgcagccaccatggcccatgagatcggccacagcctcggcctcagccacgaccccgacggctgctgcgtggaggctgcggccgagtccggaggctgcgtcatggctgcggccaccgggcacccgtttccgcgcgtgttcagcgcctgcagccgccgccagctgcgcgccttcttccgcaaggggggcggcgcttgcctctccaatgccccggaccccggactcccggtgccgccggcgctctgcgggaacggcttcgtggaagcgggcgaggagtgtgactgcggccctggccaggagtgccgcgacctctgctgctttgctcacaactgctcgctgcgcccgggggcccagtgcgcccacggggactgctgcgtgcgctgcctgctgaagccggctggagcgctgtgccgccaggccatgggtgactgtgacctccctgagttttgcacgggcacctcctcccactgtcccccagacgtttacctactggacggctcaccctgtgccaggggcagtggctactgctgggatggcgcatgtcccacgctggagcagcagtgccagcagctctgggggcctggctcccacccagctcccgaggcctgtttccaggtggtgaactctgcgggagatgctcatggaaactgcggccaggacagcgagggccacttcctgccctgtgcagggagggatgccctgtgtgggaagctgcagtgccagggtggaaagcccagcctgctcgcaccgcacatggtgccagtggactctaccgttcacctagatggccaggaagtgacttgtcggggagccttggcactccccagtgcccagctggacctgcttggcctgggcctggtagagccaggcacccagtgtggacctagaatggtgtgccagagcaggcgctgcaggaagaatgccttccaggagcttcagcgctgcctgactgcctgccacagccacggggtttgcaatagcaaccataactgccactgtgctccaggctgggctccacccttctgtgacaagccaggctttggtggcagcatggacagtggccctgtgcaggctgaaaaccatgacaccttcctgctggccatgctcctcagcgtcctgctgcctctgctcccaggggccggcctggcctggtgttgctaccgactcccaggagcccatctgcagcgatgcagctggggctgcagaagggaccctgcgtgcagtggccccaaagatggcccacacagggaccaccccctgggcggcgttcaccccatggagttgggccccacagccactggacagccctggcccctggaccctgagaactctcatgagcccagcagccaccctgagaagcctctgccagcagtctcgcctgacccccaagcagatcaagtccagatgccaagatcctgcctctggtgagaggtagctcctaaaatgaacagatttaaagacaggtggccactgacagccactccaggaacttgaactgcaggggcagagccagtgaatcaccggacctccagcacctgcaggcagcttggaagtttcttccccgagtggagcttcgacccacccactccaggaacccagagccacattagaagttcctgagggctggagaacactgctgggcacactctccagctcaataaaccatcagtcccagaagcaaaggtcacacagcccctgacctccctcaccagtggaggctgggtagtgctggccatcccaaaagggctctgtcctgggagtctggtgtgtctcctacatgcaatttccacggacccagctctgtggagggcatgactgctggccagaagctagtggtcctggggccctatggttcgactgagtccacactcccctggagcctggctggcctctgcaaacaaacataattttggggaccttccttcctgtttcttcccaccctgtcttctcccctaggtggttcctgagcccccacccccaatcccagtgctacacctgaggttctggagctcagaatctgacagcctctcccccattctgtgtgtgtcggggggacagagggaaccatttaagaaaagataccaaagtagaagtcaaaagaaagacatgttggctataggcgtggtggctcatgcctataatcccagcactttgggaagccggggtaggaggatcaccagaggccagcaggtccacaccagcctgggcaacacagcaagacaccgcatctacagaaaaattttaaaattagctgggcgtggtggtgtgtacctgtaggcctagctgctcaggaggctgaagcaggaggatcacttgagcctgagttcaacactgcagtgagctatggtggcaccactgcactccagcctgggtgacagagcaagaccctgtctctaaaataaattttaaaaagacataaaaaaaaaaaaaaaaaaaaaaaaaaaaaaaaaaaaaaaaaaaaaaaaaaaaaaaaaaaaaaaaaaaaaaaaaaaa

SEQ ID NO: 14855 - DNA, 3516 bp, Homo sapiens
gctgcaccgggcacgggtcggccgcaatccagcctgggcggagccggagttgcgagccgctgcctagaggccgaggagctcacagctatgggctggaggccccggagagctcgggggaccccgttgctgctgctgctactactgctgctgctctggccagtgccaggcgccggggtgcttcaaggacatatccctgggcagccagtcaccccgcactgggtcctggatggacaaccctggcgcaccgtcagcctggaggagccggtctcgaagccagacatggggctggtggccctggaggctgaaggccaggagctcctgcttgagctggagaagaaccacaggctgctggccccaggatacatagaaacccactacggcccagatgggcagccagtggtgctggcccccaaccacacggatcattgccactaccaagggcgagtaaggggcttccccgactcctgggtagtcctctgcacctgctctgggatgagtggcctgatcaccctcagcaggaatgccagctattatctgcgtccctggccaccccggggctccaaggacttctcaacccacgagatctttcggatggagcagctgctcacctggaaaggaacctgtggccacagggatcctgggaacaaagcgggcatgaccagccttcctggtggtccccagagcaggggcaggcgagaagcgcgcaggacccggaagtacctggaactgtacattgtggcagaccacaccctgttcttgactcggcaccgaaacttgaaccacaccaaacagcgtctcctggaagtcgccaactacgtggaccagcttctcaggactctggacattcaggtggcgctgaccggcctggaggtgtggaccgagcgggaccgcagccgcgtcacgcaggacgccaacgccacgctctgggccttcctgcagtggcgccgggggctgtgggcgcagcggccccacgactccgcgcagctgctcacgggccgcgccttccagggcgccacagtgggcctggcgcccgtcgagggcatgtgccgcgccgagagctcgggaggcgtgagcacggaccactcggagctccccatcggcgccgcagccaccatggcccatgagatcggccacagcctcggcctcagccacgaccccgacggctgctgcgtggaggctgcggccgagtccggaggctgcgtcatggctgcggccaccgggcacccgtttccgcgcgtgttcagcgcctgcagccgccgccagctgcgcgccttcttccgcaaggggggcggcgcttgcctctccaatgccccggaccccggactcccggtgccgccggcgctctgcgggaacggcttcgtggaagcgggcgaggagtgtgactgcggccctggccaggagtgccgcgacctctgctgctttgctcacaactgctcgctgcgcccgggggcccagtgcgcccacggggactgctgcgtgcgctgcctgctgaagccggctggagcgctgtgccgccaggccatgggtgactgtgacctccctgagttttgcacgggcacctcctcccactgtcccccagacgtttacctactggacggctcaccctgtgccaggggcagtggctactgctgggatggcgcatgtcccacgctggagcagcagtgccagcagctctgggggcctggctcccacccagctcccgaggcctgtttccaggtggtgaactctgcgggagatgctcatggaaactgcggccaggacagcgagggccacttcctgccctgtgcagggagggatgccctgtgtgggaagctgcagtgccagggtggaaagcccagcctgctcgcaccgcacatggtgccagtggactctaccgttcacctagatggccaggaagtgacttgtcggggagccttggcactccccagtgcccagctggacctgcttggcctgggcctggtagagccaggcacccagtgtggacctagaatggtttgcaatagcaaccataactgccactgtgctccaggctgggctccacccttctgtgacaagccaggctttggtggcagcatggacagtggccctgtgcaggctgaaaaccatgacaccttcctgctggccatgctcctcagcgtcctgctgcctctgctcccaggggccggcctggcctggtgttgctaccgactcccaggagcccatctgcagcgatgcagctggggctgcagaagggaccctgcgtgcagtggccccaaagatggcccacacagggaccaccccctgggcggcgttcaccccatggagttgggccccacagccactggacagccctggcccctggaccctgagaactctcatgagcccagcagccaccctgagaagcctctgccagcagtctcgcctgacccccaagcagatcaagtccagatgccaagatcctgcctctggtgagaggtagctcctaaaatgaacagatttaaagacaggtggccactgacagccactccaggaacttgaactgcaggggcagagccagtgaatcaccggacctccagcacctgcaggcagcttggaagtttcttccccgagtggagcttcgacccacccactccaggaacccagagccacattagaagttcctgagggctggagaacactgctgggcacactctccagctcaataaaccatcagtcccagaagcaaaggtcacacagcccctgacctccctcaccagtggaggctgggtagtgctggccatcccaaaagggctctgtcctgggagtctggtgtgtctcctacatgcaatttccacggacccagctctgtggagggcatgactgctggccagaagctagtggtcctggggccctatggttcgactgagtccacactcccctggagcctggctggcctctgcaaacaaacataattttggggaccttccttcctgtttcttcccaccctgtcttctcccctaggtggttcctgagcccccacccccaatcccagtgctacacctgaggttctggagctcagaatctgacagcctctcccccattctgtgtgtgtcggggggacagagggaaccatttaagaaaagataccaaagtagaagtcaaaagaaagacatgttggctataggcgtggtggctcatgcctataatcccagcactttgggaagccggggtaggaggatcaccagaggccagcaggtccacaccagcctgggcaacacagcaagacaccgcatctacagaaaaattttaaaattagctgggcgtggtggtgtgtacctgtaggcctagctgctcaggaggctgaagcaggaggatcacttgagcctgagttcaacactgcagtgagctatggtggcaccactgcactccagcctgggtgacagagcaagaccctgtctctaaaataaattttaaaaagacataaaaaaaaaaaaaaaaaaaaaaaaaaaaaaaaaaaaaaaaaaaaaaaaaaaaaaaaaaaaaaaaaaaaaaaaaaaa

SEQ ID NO: 14856 - DNA, 1379 bp, Homo sapiens
gcggccgggaggccggagcagcacggccgcaggacctgaagctccggctgcgtcttcccgcagcgctacccgccatgcgcctgccgcgccgggccgcgctggggctcctgccgcttctgctgctgctgccgcccgcgccggaggccgccaagaagccgacgccctgccaccggtgccgggggctggtggacaagtttaaccaggggatggtggacaccgcaaagaagaactttggcggcgggaacacggcttgggaggaaaagacgctgtccaagtacgagtccagcgagattcgcctgctggagatcctggaggggctgtgcgagagcagcgacttcgaatgcaaccagatgctagaggcgcaggaggagcacctggaggcctggtggctgcagctgaagagcgaatatcctgacttattcgagtggttttgtgtgaagacactgaaagtgtgctgctctccaggaacctacggtcccgactgtctcgcatgccagggcggatcccagaggccctgcagcgggaatggccactgcagcggagatgggagcagacagggcgacgggtcctgccggtgccacatggggtaccagggcccgctgtgcactgactgcatggacggctacttcagctcgctccggaacgagacccacagcatctgcacagcctgtgacgagtcctgcaagacgtgctcgggcctgaccaacagagactgcggcgagtgtgaagtgggctgggtgctggacgagggcgcctgtgtggatgtggacgagtgtgcggccgagccgcctccctgcagcgctgcgcagttctgtaagaacgccaacggctcctacacgtgcgaagagtgtgactccagctgtgtgggctgcacaggggaaggcccaggaaactgtaaagagtgtatctctggctacgcgagggagcacggacagtgtgcagatgtggacgagtgcgcactagcagaaaaaacctgtgtgaggaaaaacgaaaactgctacaatactccagggagctacgtctgtgtgtgtcctgacggcttcgaaggaacggaagatgcctgtgtgccgccggcagaggctgaagccacagaaggagaaagcccgacacagctgccctcccgcgaagacctgtaatgtgccggacttaccctttaaattattcagaaggatgtcccgtggaaaatgtggccctgaggatgccgtctcctgcagtggacagcggcggggagaggctgcctgctctctaacggttgattctcatttgtcccttaaacagctgcatttcttggttgttcttaaacagacttgtatattttgatacagttctttgtaataaaattgaccattgtaggtaaaaaaaaaaaaaaaaaaaaaaaa

SEQ ID NO: 14857 - DNA, 2786 bp, Homo sapiens
gaattcaggtaaaatattctgcctgaccagggctacatgataagccacgtacttgatcactttgtagggtcgcagcacccttcttactactattttaggtaattcaggtttctgacggggaagccagtggagctgagcgggctgcaagaggggtgggttctggatgagaagttgggacgcgtgacgagggagtagagagtgaaccttggcttaaaaggaaggaaaataactgtgaagaaaagatgacccaacttgaaataaaacctgaagaccttatctcccacttgagagagagaagaagctgaaagccatcagcttgcactctgggctcacagacagagagggtgaggggttgagcccagatctatgacttcagacccctgtctcggcccctaggcctgatcattcattcaaactctcaataaacacggattaccagaccctgcgcagggaacacatctgggaaaacagctgcaacctcggataccagcacgggacaagctatctcagggcaatgaggaacaactaaagagaatcccaggaaccaggtaaccaatcgccagaagccctccgccctcatggtccattgggtcaaggccccactgccgcctcgtatcgccagcctccagtcctgcctccacgacgcgcccttccccaaggctggccgggtctggatgtcgccatcccctattcggagctacagacctcgcagctgaactcttaaaaagaacctcgcttcttcctcacggtgctccagctccacacaccgtactgagcctcgccagccaccgtacgcgaggtcgcggcgcgtccgtgacgtcactgatgtgcgcttctcccgcactaagggaaacatggctctagcgcggccggtgcggctcttttccctcgtgactcggttgctcctggcgccgcgacggggcctcacggtccgcagtcccgacgaacccctgccggtggtgcgcatcccagtggctctacagcggcagttggaacagcggcagagcaggcggcggaacctcccgaggccggtgctggttcgacccggaccgctgctggtttcggcgcggcggccggagttgaaccagccggcgcgcctcacactgggccgttgggagcgcgcgccgctagcctctcaaggctggaagagtcgacgcgcgcgtcgggaccacttctccatcgagcgcgcgcaacaggaggcgccagcggtgcgaaagctctcgtctaagggcagctttgctgacctgggcctggagccccgtgtgctgcacgcactacaggaggctgcgcctgaagtcgttcagcccacaaccgtgcagtctagcaccatcccctcactacttcgcggccgccatgtcgtttgcgccgcagaaaccggcagtggcaagactctcagctacctcctgccgctgcttcaacggctcttgggccagccaagcctggactcccttcctatccccgcgccccgaggcctggtccttgttccttcccgagaattggcccaacaggtgcgggctgtggcccaacccttgggccgctccttgggcctgctggtgcgggacctggagggaggccacggcatgcgtaggatcaggctgcagctgtccagacagccttcagcagatgtgcttgtggccactccaggggctctgtggaaggccctgaaaagtcgactgatcagtctggagcaactctccttcttggtgttggatgaggcagacacactgctggatgaaagcttcctggaactggtggactacatcttagagaagagccacatagcagaaggcccagctgacttggaagaccccttcaatcccaaagctcagttagtgctggtaggagccacatttcccgaaggtgtaggccagttgctgaataaagtcgccagcccagatgctgtcaccaccatcaccagctccaagctccactgtatcatgcctcatgtgaaacagacatttctgagactgaagggagcagataaggtggccgagctggtgcacatcctcaagcatcgtgacagagcagaaaggactggtccctcaggaactgttctggtgttctgtaatagctccagcactgtgaactggctgggatatattctggatgaccacaaaatccaacacctaaggttgcaggggcaaatgccagccttgatgagggtaggaatcttccagtccttccagaagagctcccgagacatacttctctgcacagacatagcctctcggggcctggacagcactggtgtggagctggttgtcaattatgatttccccccaacgctgcaagattacatccacagagcagggagagtgggccgtgtggggagcgaggtgccaggcaccgtcatcagttttgtgacccatccctgggatgtgagcctggttcagaagattgagctggcggctcgccgaaggagaagtcttccaggactagcatcctcggtgaaagagcctttgccccaagcaacctgattttgacaaatctgattaaaatgtgatgctagaacagggatctttcccagtatcttgagtgggtgaccacacttgtcagtgggaggctctgggctgccctgtcggctccttgagggcgggatgaactgctttgtgacttggaaaggtacgctgctggccagcattggagaagaagctgctgagcatggctttctgtagtctttagcaagacacaagtggattttgactttgtatcatgtcatgatttctaacaataaatgatgtttttatgtgcctcccctaagaataattagcaccggggcggaattc

SEQ ID NO: 14858 - DNA, 3843 bp, Homo sapiens
ccgtgaggtgttgggtttgggggacgctggcagctgggttctcccggttcccttgggcaggtgcagggtcgggttcaaagcctccggaacgcgttttggcctgatttgaggaggggggcggggagggacctgcggcttgcggccccgcccccttctccggctcgcagccgaccggtaagcccgcctcctccctcggccggccctggggccgtgtccgccgggcaactccagccgaggcctgggcttctgcctgcaggtgtctgcggcgaggcccctagggtacagcccgatttggccccatggtgggtttcggggccaaccggcgggctggccgcctgccctctctcgtgctggtggtgctgctggtggtgatcgtcgtcctcgccttcaactactggagcatctcctcccgccacgtcctgcttcaggaggaggtggccgagctgcagggccaggtccagcgcaccgaagtggcccgcgggcggctggaaaagcgcaattcggacctcttgctgttggtggacacgcacaagaaacagatcgaccagaaggaggccgactacggccgcctcagcagccggctgcaggccagagagggcctcgggaagagatgcgaggatgacaaggttaaactacagaacaacatatcgtatcagatggcagacatacatcatttaaaggagcaacttgctgagcttcgtcaggaatttcttcgacaagaagaccagcttcaggactataggaagaacaatacttaccttgtgaagaggttagaatatgaaagttttcagtgtggacagcagatgaaggaattgagagcacagcatgaagaaaatattaaaaagttagcagaccagtttttagaggaacaaaagcaagagacccaaaagattcaatcaaatgatggaaaggaattggatataaacaatcaagtagtacctaaaaatattccaaaagtagctgagaatgttgcagataagaatgaagaaccctcaagcaatcatattccacatgggaaagaacaaatcaaaagaggtggtgatgcagggatgcctggaatagaagagaatgacctagcaaaagttgatgatcttccccctgctttaaggaagcctcctatttcagtttctcaacatgaaagtcatcaagcaatctcccatcttccaactggacaacctctctccccaaatatgcctccagattcacacataaaccacaatggaaaccccggtacttcaaaacagaatccttccagtcctcttcagcgtttaattccaggctcaaacttggacagtgaacccagaattcaaacagatatactaaagcaggctaccaaggacagagtcagtgatttccataaattgaagcaaaatgatgaagaacgagagcttcaaatggatcctgcagactatggaaagcaacatttcaatgatgtcctttaagtcctaaaggaatgcttcagaaaacctaaagtgctgtaaaatgaaatcattctactttgtcctttctgacttttgttgtaaagacgaattgtatcagttgtaaagatacattgagatagaattaaggaaaaactttaatgaaggaatgtacccatgtacatatgtgaactttttcatattgtattatcaaggtatagacttttttggttatgatacagttaagccaaaaacagctaatctttgcatctaaagcaaactaatgtatatttcacattttattgagccgacttatttccacaaatagataaacaggacaaaatagttgtacaggttatatgtggcatagcataaccacagtaagaacagaacagatattcagcagaaaactttttatactctaattctttttttttttttttttgagacagagttttagtcttgtttcccaggctggagtgcaatggcacaatcttggctcactgcaacctccgcctcctgggttcaggcaattttcctgcctcagcctcccaagtagctgggattacaggcacccaccaccatgcccagctaatttttgtatttttaatagagagctaataattgtatatttaataaagacgggtttcaccatgttggccaggctggtcttgaactcctgacctcaggtgatcctcctgcattggcctcccaaagtgctggaattccaggcatgagccactgcgcccagtctacacactaattcttgttagcccaacagctgttctgttctatctacccctcatttcacgctcaaggagtcatacctagaatagttacacacaagagggaaactggaagccaaacactgtacagtattgtgtagaaagtcacctccctactccttttattttacatgagtgctgatgtgttttggcagatgagctttcagctgaggcctgatggaaattgagataacctgcaaagacataacagtatttatgagttatatcttagttcttgaaattgtggaatgcatgattgacaatatatttttaatttttattttttcaagtaataccagtactgtttaactatagccagaactggctaaaatttttatattttcagagttgaagttggtgaagacattcatgatttaaacaccagatcctgaaaggggttaaatctactttgaaatgaatctgcaatcagtatttcaaagcttttctggtaattttagtgatcttatttgattagactttttcagaagtactaaataaggaattttaacaggtttttattaatgcacagataaatagaagtacagtgaggtctatagccattttattaaaatagcttaaaagtttgtaaaaaaatgaatctttgtaattacttaatatgttagttaagaacccgtcaagcttatatttgctagacttacaaattattttaaatgcatttatcttttttgacactattcagtggaatgtgtaagctagctaattcttgttttctgatttaaagcacttttaaatcttatcctgccccctaaaaacaaaaggttttgatcacaaggggaaatttaagattgttaaccctgtttttcagaagggctactgttaattgcacataaacatgaaatgtgttttcccctgtgtactaacacattctaggcaaaattcaaacttatagtggtaaagaaacaggttgttcacttgctgaggtgcaaaaattcttaagacttctgtttgaaattgctcaatgactaggaaaagatgtagtagtttactaaaattgtttttctaccatatcaaattaaacaattcatgcctttatagggtcaggcctacaatgaataggtatggtggtttcacagaattttaaaatagagttaaagggaagtgatgtacatttcgggggcattagggtagggagatgaatcaaaaaatacccctagtaatgctttatattttaatactgcaaaagctttacaaatggaaaccatgcaattacctgccttagttcttttgtcataaaaacaatcacttggttggttgtattgtagctattacttatacagcaacatttcttcaattagcagtctagacattttataaacagaaatcttggaccaattgataatatttctgactgtattaatattttagtgctataaaatactatgtgaatctcttaaaaatctgacattttacagtctgtattagacatactgtttttataatgttttacttctgccttaagatttaggttttttaaatgtatttttgccctgaattaagtgttaatttgatggaaactctgcttttaaaatcatcatttactgggttctaataaattaaaaattaaacttgaaaaaaaaaaaaaaaaaaaaaaaaaaaaaaaaaaaaaaaaaaaaaaaaaa

SEQ ID NO: 14859 - DNA, 4011 bp, Homo sapiens
ccgtgaggtgttgggtttgggggacgctggcagctgggttctcccggttcccttgggcaggtgcagggtcgggttcaaagcctccggaacgcgttttggcctgatttgaggaggggggcggggagggacctgcggcttgcggccccgcccccttctccggctcgcagccgaccggtaagcccgcctcctccctcggccggccctggggccgtgtccgccgggcaactccagccgaggcctgggcttctgcctgcaggtgtctgcggcgaggcccctagggtacagcccgatttggccccatggtgggtttcggggccaaccggcgggctggccgcctgccctctctcgtgctggtggtgctgctggtggtgatcgtcgtcctcgccttcaactactggagcatctcctcccgccacgtcctgcttcaggaggaggtggccgagctgcagggccaggtccagcgcaccgaagtggcccgcgggcggctggaaaagcgcaattcggacctcttgctgttggtggacacgcacaagaaacagatcgaccagaaggaggccgactacggccgcctcagcagccggctgcaggccagagagggcctcgggaagagatgcgaggatgacaaggttaaactacagaacaacatatcgtatcagatggcagacatacatcatttaaaggagcaacttgctgagcttcgtcaggaatttcttcgacaagaagaccagcttcaggactataggaagaacaatacttaccttgtgaagaggttagaatatgaaagttttcagtgtggacagcagatgaaggaattgagagcacagcatgaagaaaatattaaaaagttagcagaccagtttttagaggaacaaaagcaagagacccaaaagattcaatcaaatgatggaaaggaattggatataaacaatcaagtagtacctaaaaatattccaaaagtagctgagaatgttgcagataagaatgaagaaccctcaagcaatcatattccacatgggaaagaacaaatcaaaagaggtggtgatgcagggatgcctggaatagaagagaatgacctagcaaaagttgatgatcttccccctgctttaaggaagcctcctatttcagtttctcaacatgaaagtcatcaagcaatctcccatcttccaactggacaacctctctccccaaatatgcctccagattcacacataaaccacaatggaaaccccggtacttcaaaacagaatccttccagtcctcttcagcgtttaattccaggctcaaacttggacagtgaacccagaattcaaacagatatactaaagcaggctaccaaggacagagtcagtgatttccataaattgaagcaaagccgattctttgatgaaaatgaatcccctgttgatccgcagcatggctctaaactggcggattataatggggatgatggtaacgtaggtgagtatgaggcagacaagcaggctgagctggcttacaatgaggaagaagatggtgatggtggagaggaagacgtccaagatgatgaagaacgagagcttcaaatggatcctgcagactatggaaagcaacatttcaatgatgtcctttaagtcctaaaggaatgcttcagaaaacctaaagtgctgtaaaatgaaatcattctactttgtcctttctgacttttgttgtaaagacgaattgtatcagttgtaaagatacattgagatagaattaaggaaaaactttaatgaaggaatgtacccatgtacatatgtgaactttttcatattgtattatcaaggtatagacttttttggttatgatacagttaagccaaaaacagctaatctttgcatctaaagcaaactaatgtatatttcacattttattgagccgacttatttccacaaatagataaacaggacaaaatagttgtacaggttatatgtggcatagcataaccacagtaagaacagaacagatattcagcagaaaactttttatactctaattctttttttttttttttttgagacagagttttagtcttgtttcccaggctggagtgcaatggcacaatcttggctcactgcaacctccgcctcctgggttcaggcaattttcctgcctcagcctcccaagtagctgggattacaggcacccaccaccatgcccagctaatttttgtatttttaatagagagctaataattgtatatttaataaagacgggtttcaccatgttggccaggctggtcttgaactcctgacctcaggtgatcctcctgcattggcctcccaaagtgctggaattccaggcatgagccactgcgcccagtctacacactaattcttgttagcccaacagctgttctgttctatctacccctcatttcacgctcaaggagtcatacctagaatagttacacacaagagggaaactggaagccaaacactgtacagtattgtgtagaaagtcacctccctactccttttattttacatgagtgctgatgtgttttggcagatgagctttcagctgaggcctgatggaaattgagataacctgcaaagacataacagtatttatgagttatatcttagttcttgaaattgtggaatgcatgattgacaatatatttttaatttttattttttcaagtaataccagtactgtttaactatagccagaactggctaaaatttttatattttcagagttgaagttggtgaagacattcatgatttaaacaccagatcctgaaaggggttaaatctactttgaaatgaatctgcaatcagtatttcaaagcttttctggtaattttagtgatcttatttgattagactttttcagaagtactaaataaggaattttaacaggtttttattaatgcacagataaatagaagtacagtgaggtctatagccattttattaaaatagcttaaaagtttgtaaaaaaatgaatctttgtaattacttaatatgttagttaagaacccgtcaagcttatatttgctagacttacaaattattttaaatgcatttatcttttttgacactattcagtggaatgtgtaagctagctaattcttgttttctgatttaaagcacttttaaatcttatcctgccccctaaaaacaaaaggttttgatcacaaggggaaatttaagattgttaaccctgtttttcagaagggctactgttaattgcacataaacatgaaatgtgttttcccctgtgtactaacacattctaggcaaaattcaaacttatagtggtaaagaaacaggttgttcacttgctgaggtgcaaaaattcttaagacttctgtttgaaattgctcaatgactaggaaaagatgtagtagtttactaaaattgtttttctaccatatcaaattaaacaattcatgcctttatagggtcaggcctacaatgaataggtatggtggtttcacagaattttaaaatagagttaaagggaagtgatgtacatttcgggggcattagggtagggagatgaatcaaaaaatacccctagtaatgctttatattttaatactgcaaaagctttacaaatggaaaccatgcaattacctgccttagttcttttgtcataaaaacaatcacttggttggttgtattgtagctattacttatacagcaacatttcttcaattagcagtctagacattttataaacagaaatcttggaccaattgataatatttctgactgtattaatattttagtgctataaaatactatgtgaatctcttaaaaatctgacattttacagtctgtattagacatactgtttttataatgttttacttctgccttaagatttaggttttttaaatgtatttttgccctgaattaagtgttaatttgatggaaactctgcttttaaaatcatcatttactgggttctaataaattaaaaattaaacttgaaaaaaaaaaaaaaaaaaaaaaaaaaaaaaaaaaaaaaaaaaaaaaaaaa

SEQ ID NO: 14860 - DNA, 1897 bp, Homo sapiens
aaacacttgcaaccacaagcaaactcgccgctccctgggtcccttcccagtggactctgcacattgggagccttataaagtagcctctgcatctgcctgcctcgggcagaggagggctaccctggggctgagagttcacctgtctcaggaaccacctgagcccacagatcctgtgggcagcggccagggcagccatggcttgggcaagtaggctgggcctgctgctggcactgctgctgcccgtggtcggtgcctccacgccaggcaccgtggtccgactcaacaaggcagcattgagctacgtgtctgaaattgggaaagcccctctccagcgggccctgcaggtcactgtccctcatttcctggactggagtggagaggcgcttcagcccaccaggatccggattctgaatgtccatgtgccccgcctccacctgaaattcattgctggtttcggagtgcgcctgctggcagcagctaattttactttcaaggtctttcgcgccccagagcccctggagctgacgctgcctgtggaactgctggctgacacccgcgtgacccagagctccatcaggacccctgtggtcagcatctctgcctgctctttattctcgggccacgccaacgagtttgatggcagtaacagcacctcccacgcgctgctggtcctggtgcagaagcacattaaagctgtcttgagtaacaagctgtgcctgagcatctccaacctggtgcagggtgtcaatgtccacctgggcaccttaattggcctcaaccccgtgggtcctgagtcccagatccgctattccatggtcagtgtgcccactgtcaccagtgactacatttccctggaagtcaatgctgttctcttcctgctgggcaagcccatcatcctgcccacggatgccaccccttttgtgttgccaaggcatgtgggtaccgagggctccatggccaccgtgggcctctcccagcagctgtttgactctgcgctcctgctgctgcagaaggccggtgccctcaacctggacatcacagggcagctgaggtcggatgacaacctgctgaacacctctgctctgggccggctcatcccggaggtggcccgccagtttcccgagcccatgcctgtggtgctcaaggtgcggctgggtgccacacctgtggccatgctccacacaaacaacgccaccctgcggctgcagcccttcgtggaggtcctggccacagcctccaactcggctttccagtccctcttctccctggatgtggtagtgaacttgagactccagctctctgtgtccaaggtgaagcttcaggggaccacgtctgtgctgggggatgtccagctcacggtggcctcctccaacgtgggcttcattgatacagatcaggtgcgcacactgatgggcaccgtttttgagaagcccctgctggaccatctcaatgctctcttggccatgggaattgccctccctggtgtggtcaacctccactatgtcgcccctgagatctttgtctatgagggctacgtggtgatatccagtggactcttctaccagagctgaggcaagaccactgggaggcctgagagtgggccagctcgctgctcaggcgaatttctcatttcaagccactggggaaactgaggcaaaaccatacttagtcatcaccaacaagctggactgcttagctgggctgttttatcttccctgagtgcctgggtctccctccctcacttctgccctttcccttcctcctcctcttctcctccctcttccctcatctcccccctccttcctctgccccaccccagcggggagcagactgctcctccaggctgtatagacctgccctcttgcattaaacaacttctcttgagctgcaactttca

SEQ ID NO: 14861 - DNA, 2828 bp, Homo sapiens
gggcagggtccccgcgcaccgcggagtgggctgtgattggaggaggagcccgtgccgggcgggcccgagcgggtgtcgagccggttcctccagtctgccccgcgcgcggagctgcgcgcactgggtccccaagagcccgcgggcgtccggcagccgagcgcacgttctttcggatgcacacgcccgggtccctggcgtctgacgccgtggggagggcagcgaggccccaggtacttactacaccattctttggcgaaggctattcagcagtggtgacctcttccaatccaacactctacagattattatctctggactcccagctgacaccctgccggaggcaagagctactaagccaactggaactgtgccttttctcttgtcaaggtttttttcttacacaggaaaaagaaagaaaaaaaaaagatgaagttgggcaaagtggagttctgccattttctgcagctaatagctcttttcctgtgtttttctgggatgagtcaagcagaactctcaaggtccagatcaaagccctatttccaatcagggaggtcccggaccaagcgcagctgggtgtggaatcagttctttgtgctggaggaatacatgggttcagaccccctctatgtaggaaagcttcactctgatgttgataaaggagatggttccatcaaatacatcttgtcaggcgaaggggcaagttccattttcattattgatgagaacactggggatattcatgccaccaagagactggatcgtgaggagcaggcctactacacgctccgagctcaagcgctggataggctcaccaacaaacccgtggagcccgagtcggagtttgtcatcaaaattcaggatatcaacgacaatgaacccaaatttttggatggcccatacacggcaggagttcccgaaatgtctcccgtggggacctcagtggtacaagtgacagcgacggatgctgatgatcctacatatggcaacagtgccagagtggtctacagtattctgcaaggacagccgtacttctcagtggagccaaagacaggagtcatcaagactgcccttccaaacatggatagagaggctaaagaccagtatttgcttgtcattcaggcaaaggatatggttggtcaaaatggaggactgtcaggaactacatcagtcactgtgaccctaactgatgtcaacgataatccacctcgctttcctcgaaggtcttatcaatataacgtcccagagtcattacctgtagcctcagttgtggccagaattaaagctgctgatgcagatattggagctaatgctgaaatggagtacaagattgtggatggtgatggtttgggcatttttaagatttctgttgacaaagaaacccaggaaggaatcattactatacagaaggagctggattttgaagccaaaacaagttacacgctacggatagaagctgcaaataaagatgccgaccctcgctttctgagcttgggtccgttcagtgacacgacaactgtgaagataattgtggaagatgtagatgagccccctgtgttctcttcacccttgtaccctatggaggtgtcggaagctacccaggttgggaatatcattggcactgtagcagctcatgacccagattcttccaatagccctgtgaggtactcaattgacagaaacacagacttggagagatacttcaatattgatgccaacagtggggtcatcacaactgccaagtctttggatcgagagacaaatgctattcacaatatcacagtccttgcaatggagagccagaatccatctcaagtaggaagaggctatgtggccatcactatacttgacatcaatgataacgcccctgaatttgccatggactatgagaccaccgtctgtgaaaatgcccagccggggcaggttatccagaaaatcagtgctgtggataaagatgagccatccaatggacaccagttttacttcagcttaacaacggatgcaacaaataaccacaacttttcattgaaagataacaaagacaacacagcctcaatactgaccaggagaaacggcttccggagacaggaacaatcagtttactatctgccaattttcattgtggacagtggatctccctcacttagcagcaccaacaccctcaccatccgcgtgtgtgactgtgatgctgacggcgtagcccagacctgcaatgcagaggcctatgtcctacctgctggcctcagtacaggagccctgatagccatactcgcctgtgtcttgacattattggtgttgatcctccttatcgtcactatgagaagacggaaaaaagagccccttatttttgacgaagaaagagacatcagagaaaatattgtgagatacgatgacgagggcgggggagaggaggacacggaagcgtttgacatggctgcactgagaaacctcaacgtcatccgagacaccaagacccggagggatgtgactccagaaattcaattcctgagtcgaccagcttttaaaagcatcccagataatgtcatctttagggaatttatttgggaaagattaaaagaagccgatgttgatcctggtgctcctccttatgactccctgcagacatatgcttttgaaggaaatggctcagttgctgaatcactcagctctttagattccatcagctcaaactctgatcagaactatgactacctaagtgactggggacctcgctttaaacgactcgcggacatgtatgggactggccaagagagtttgtactcatagccttggaaccttaattcgaaatgtactgaagaaaaagtaacagc

SEQ ID NO: 14862 - DNA, 2728 bp, Homo sapiens
ctagggcagtccgaggagattgaaagggcaaaactatcaagcaagaaaactgtaagttctgattagttttatgactttgccttcatgcctcaggagctcaactgatcacggctttcacgacaggctaaggtacttactacaccattctttggcgaaggctattcagcagtggtgacctcttccaatccaacactctacagattattatctctggactcccagctgacaccctgccggaggcaagagctactaagccaactggaactgtgccttttctcttgtcaaggtttttttcttacacaggaaaaagaaagaaaaaaaaaagatgaagttgggcaaagtggagttctgccattttctgcagctaatagctcttttcctgtgtttttctgggatgagtcaagcagaactctcaaggtccagatcaaagccctatttccaatcagggaggtcccggaccaagcgcagctgggtgtggaatcagttctttgtgctggaggaatacatgggttcagaccccctctatgtaggaaagcttcactctgatgttgataaaggagatggttccatcaaatacatcttgtcaggcgaaggggcaagttccattttcattattgatgagaacactggggatattcatgccaccaagagactggatcgtgaggagcaggcctactacacgctccgagctcaagcgctggataggctcaccaacaaacccgtggagcccgagtcggagtttgtcatcaaaattcaggatatcaacgacaatgaacccaaatttttggatggcccatacacggcaggagttcccgaaatgtctcccgtggggacctcagtggtacaagtgacagcgacggatgctgatgatcctacatatggcaacagtgccagagtggtctacagtattctgcaaggacagccgtacttctcagtggagccaaagacaggagtcatcaagactgcccttccaaacatggatagagaggctaaagaccagtatttgcttgtcattcaggcaaaggatatggttggtcaaaatggaggactgtcaggaactacatcagtcactgtgaccctaactgatgtcaacgataatccacctcgctttcctcgaaggtcttatcaatataacgtcccagagtcattacctgtagcctcagttgtggccagaattaaagctgctgatgcagatattggagctaatgctgaaatggagtacaagattgtggatggtgatggtttgggcatttttaagatttctgttgacaaagaaacccaggaaggaatcattactatacagaaggagctggattttgaagccaaaacaagttacacgctacggatagaagctgcaaataaagatgccgaccctcgctttctgagcttgggtccgttcagtgacacgacaactgtgaagataattgtggaagatgtagatgagccccctgtgttctcttcacccttgtaccctatggaggtgtcggaagctacccaggttgggaatatcattggcactgtagcagctcatgacccagattcttccaatagccctgtgaggtactcaattgacagaaacacagacttggagagatacttcaatattgatgccaacagtggggtcatcacaactgccaagtctttggatcgagagacaaatgctattcacaatatcacagtccttgcaatggagagccagaatccatctcaagtaggaagaggctatgtggccatcactatacttgacatcaatgataacgcccctgaatttgccatggactatgagaccaccgtctgtgaaaatgcccagccggggcaggttatccagaaaatcagtgctgtggataaagatgagccatccaatggacaccagttttacttcagcttaacaacggatgcaacaaataaccacaacttttcattgaaagataacaaagacaacacagcctcaatactgaccaggagaaacggcttccggagacaggaacaatcagtttactatctgccaattttcattgtggacagtggatctccctcacttagcagcaccaacaccctcaccatccgcgtgtgtgactgtgatgctgacggcgtagcccagacctgcaatgcagaggcctatgtcctacctgctggcctcagtacaggagccctgatagccatactcgcctgtgtcttgacattattggtgttgatcctccttatcgtcactatgagaagacggaaaaaagagccccttatttttgacgaagaaagagacatcagagaaaatattgtgagatacgatgacgagggcgggggagaggaggacacggaagcgtttgacatggctgcactgagaaacctcaacgtcatccgagacaccaagacccggagggatgtgactccagaaattcaattcctgagtcgaccagcttttaaaagcatcccagataatgtcatctttagggaatttatttgggaaagattaaaagaagccgatgttgatcctggtgctcctccttatgactccctgcagacatatgcttttgaaggaaatggctcagttgctgaatcactcagctctttagattccatcagctcaaactctgatcagaactatgactacctaagtgactggggacctcgctttaaacgactcgcggacatgtatgggactggccaagagagtttgtactcatagccttggaaccttaattcgaaatgtactgaagaaaaagtaacagca

SEQ ID NO: 14863 - DNA, 2117 bp, Homo sapiens
ggcaacgaggggctgcctctggggggtccgctagtcgcggggcggcggcggcggctgcgggcgcgaggttcccagcaggatgccccggctctgcaggaagctgaagtgagaggcccggagagggcccagcccgcccggggcaggatgaccaaggcccggctgttccggctgtggctggtgctggggtcggtgttcatgatcctgctgatcatcgtgtactgggacagcgcaggcgccgcgcacttctacttgcacacgtccttctctaggccgcacacggggccgccgctgcccacgcccgggccggacagggacagggagctcacggccgactccgatgtcgacgagtttctggacaagtttctcagtgctggcgtgaagcagagcgaccttcccagaaaggagacggagcagccgcctgcgccggggagcatggaggagagcgtgagaggctacgactggtccccgcgcgacgcccggcgcagcccagaccagggccggcagcaggcggagcggaggagcgtgctgcggggcttctgcgccaactccagcctggccttccccaccaaggagcgcgcattcgacgacatccccaactcggagctgagccacctgatcgtggacgaccggcacggggccatctactgctacgtgcccaaggtggcctgcaccaactggaagcgcgtgatgatcgtgctgagcggaagcctgctgcaccgcggtgcgccctaccgcgacccgctgcgcatcccgcgcgagcacgtgcacaacgccagcgcgcacctgaccttcaacaagttctggcgccgctacgggaagctctcccgccacctcatgaaggtcaagctcaagaagtacaccaagttcctcttcgtgcgcgaccccttcgtgcgcctgatctccgccttccgcagcaagttcgagctggagaacgaggagttctaccgcaagttcgccgtgcccatgctgcggctgtacgccaaccacaccagcctgcccgcctcggcgcgcgaggccttccgcgctggcctcaaggtgtccttcgccaacttcatccagtacctgctggacccgcacacggagaagctggcgcccttcaacgagcactggcggcaggtgtaccgcctctgccacccgtgccagatcgactacgacttcgtggggaagctggagactctggacgaggacgccgcgcagctgctgcagctactccaggtggaccggcagctccgcttccccccgagctaccggaacaggaccgccagcagctgggaggaggactggttcgccaagatccccctggcctggaggcagcagctgtataaactctacgaggccgactttgttctcttcggctaccccaagcccgaaaacctcctccgagactgaaagctttcgcgttgctttttctcgcgtgcctggaacctgacgcacgcgcactccagtttttttatgacctacgattttgcaatctgggcttcttgttcactccactgcctctatccattgagtactgtatcgatattgttttttaagattaatatatttcaggtatttaatacgaaatgtggaagggaatgctggagtaaaatatcccctctcccctccgcccgcccgcccgcccgcccgctcgcccgcccgcccgctcgcccgctcctgtggtttttctgagcgtgcgggctccgggaggggatgctgaggctgatggagctgcctccagggctagggccactcaccggaggagggcggggcctgcacttgaagtcaggccgcacctgtctgtttttggaagggtagccgacaaatccttccagagggaaagttctttgtttaagtgttgtacttgaaaaggtcaatcttcagggcttcctgtttgaagtcaagtcagaggtaaaccggtcagttacagaagcaggatttctaggatttctaactccagctgttcccatactgtctagtttaaattatggctgttaaggccgggcgggtgactcaggcaggtaatcccagaactttgggaggcccagacagaaggatcgcttgaggtcaggaatttgagacctggccaacatggtgaaaccctgtctctactaaaaaaaaaaaaaaaaaaaaaaaaa

SEQ ID NO: 14864 - DNA, 1428 bp, Homo sapiens
atttcctgggaggggagagggtgcgaccaagccctggctccagctctagcgggtatctgcccaccatggccctggtgctgatcctccagctgctgaccctctggcctctgtgtcacacagacatcactccgtctgtccccccagcttcataccaccctaagccatggctgggagctcagccggctacagttgtgacccctggggtcaacgtgaccttgagatgccgggcaccccaacccgcttggagatttggacttttcaagcctggagagatcgctccccttctcttccgggatgtgtcctccgagctggcagaattctttctggaggaggtgactccagcccaagggggaatttaccgctgctgctaccgaaggccagactgggggccgggtgtctggtcccagcccagcgatgtcctggagctgctggtgacagaggagctgccgcggccgtcgctggtggcgctgcccgggccggtggtgggtcctggcgccaacgtgagcctgcgctgcgcgggccgcctgcggaacatgagcttcgtgctgtaccgcgagggcgtggcggccccgctgcagtaccgccactccgcgcagccctgggccgacttcacgctgctgggcgcccgcgcccccggcacctacagctgctactatcacacgccctccgcgccctacgtgctgtcgcagcgcagcgaggtgctggtcatcagctgggaagactctggctcctccgactacacccgggggaacctagtccgcctggggctggccgggctggtcctcatctccctgggcgcgctggtcacttttgactggcgcagtcagaaccgcgctcctgctggtatccgcccctgagccccaggagcactgcagcccgagacttccaacctgagtggcggagaagctgggaccctgggctggactgtcctttcctgcagccccacagtcctgctggctgagctccgcggaacggtccttagaccccgctgtgccctgtgctgtagcttctttccaggcctttcccaaggagtagctgaaaggaagacgcgattagtggttaagacttccaagccagaagacagagggttcgaatcccagcactgccgtctactcactgtagtagtagcagctacagaaaggtagtagtgagacgtgaagccagctggacttcctgggttgaatggggacctggagaacttttctgtcttacaagaggattgtaaaatggaccaatcagcactctgtaagatggaccaatcagcgctctgtaaaatggaccaatcagcaggacatgggcggggacaataagggaataaaagctggcgagcgcggcaccccaccagagtctgcttccacgctgtgggagctttgttctcttgctctacacaataaatcttgctgctgctaaaaaaaaaaaaaaaaaaaa

SEQ ID NO: 14865 - DNA, 1395 bp, Homo sapiens
atttcctgggaggggagagggtgcgaccaagccctggctccagctctagcgggtatctgcccaccatggccctggtgctgatcctccagctgctgaccctcttccccccagcttcataccaccctaagccatggctgggagctcagccggctacagttgtgacccctggggtcaacgtgaccttgagatgccgggcaccccaacccgcttggagatttggacttttcaagcctggagagatcgctccccttctcttccgggatgtgtcctccgagctggcagaattctttctggaggaggtgactccagcccaagggggaatttaccgctgctgctaccgaaggccagactgggggccgggtgtctggtcccagcccagcgatgtcctggagctgctggtgacagaggagctgccgcggccgtcgctggtggcgctgcccgggccggtggtgggtcctggcgccaacgtgagcctgcgctgcgcgggccgcctgcggaacatgagcttcgtgctgtaccgcgagggcgtggcggccccgctgcagtaccgccactccgcgcagccctgggccgacttcacgctgctgggcgcccgcgcccccggcacctacagctgctactatcacacgccctccgcgccctacgtgctgtcgcagcgcagcgaggtgctggtcatcagctgggaagactctggctcctccgactacacccgggggaacctagtccgcctggggctggccgggctggtcctcatctccctgggcgcgctggtcacttttgactggcgcagtcagaaccgcgctcctgctggtatccgcccctgagccccaggagcactgcagcccgagacttccaacctgagtggcggagaagctgggaccctgggctggactgtcctttcctgcagccccacagtcctgctggctgagctccgcggaacggtccttagaccccgctgtgccctgtgctgtagcttctttccaggcctttcccaaggagtagctgaaaggaagacgcgattagtggttaagacttccaagccagaagacagagggttcgaatcccagcactgccgtctactcactgtagtagtagcagctacagaaaggtagtagtgagacgtgaagccagctggacttcctgggttgaatggggacctggagaacttttctgtcttacaagaggattgtaaaatggaccaatcagcactctgtaagatggaccaatcagcgctctgtaaaatggaccaatcagcaggacatgggcggggacaataagggaataaaagctggcgagcgcggcaccccaccagagtctgcttccacgctgtgggagctttgttctcttgctctacacaataaatcttgctgctgctaaaaaaaaaaaaaaaaaaaa

SEQ ID NO: 14866 - DNA, 1440 bp, Homo sapiens
atttcctgggaggggagagggtgcgaccaagccctggctccagctctagcgggtatctgcccaccatggccctggtgctgatcctccagctgctgaccctctggcctctgtgtcacacagacatcactccgtctgtggccattatagtccccccagcttcataccaccctaagccatggctgggagctcagccggctacagttgtgacccctggggtcaacgtgaccttgagatgccgggcaccccaacccgcttggagatttggacttttcaagcctggagagatcgctccccttctcttccgggatgtgtcctccgagctggcagaattctttctggaggaggtgactccagcccaagggggaatttaccgctgctgctaccgaaggccagactgggggccgggtgtctggtcccagcccagcgatgtcctggagctgctggtgacagaggagctgccgcggccgtcgctggtggcgctgcccgggccggtggtgggtcctggcgccaacgtgagcctgcgctgcgcgggccgcctgcggaacatgagcttcgtgctgtaccgcgagggcgtggcggccccgctgcagtaccgccactccgcgcagccctgggccgacttcacgctgctgggcgcccgcgcccccggcacctacagctgctactatcacacgccctccgcgccctacgtgctgtcgcagcgcagcgaggtgctggtcatcagctgggaagactctggctcctccgactacacccgggggaacctagtccgcctggggctggccgggctggtcctcatctccctgggcgcgctggtcacttttgactggcgcagtcagaaccgcgctcctgctggtatccgcccctgagccccaggagcactgcagcccgagacttccaacctgagtggcggagaagctgggaccctgggctggactgtcctttcctgcagccccacagtcctgctggctgagctccgcggaacggtccttagaccccgctgtgccctgtgctgtagcttctttccaggcctttcccaaggagtagctgaaaggaagacgcgattagtggttaagacttccaagccagaagacagagggttcgaatcccagcactgccgtctactcactgtagtagtagcagctacagaaaggtagtagtgagacgtgaagccagctggacttcctgggttgaatggggacctggagaacttttctgtcttacaagaggattgtaaaatggaccaatcagcactctgtaagatggaccaatcagcgctctgtaaaatggaccaatcagcaggacatgggcggggacaataagggaataaaagctggcgagcgcggcaccccaccagagtctgcttccacgctgtgggagctttgttctcttgctctacacaataaatcttgctgctgctaaaaaaaaaaaaaaaaaaaa

SEQ ID NO: 14867 - DNA, 1075 bp, Homo sapiens
cagagctgctgtcatggcggccgctctgtggggcttctttcccgtcctgctgctgctgctgctatcgggggatgtccagagctcggaggtgcccggggctgctgctgagggatcgggagggagtggggtcggcataggagatcgcttcaagattgaggggcgtgcagttgttccaggggtgaagcctcaggactggatctcggcggcccgagtgctggtagacggagaagagcacgtcggtttccttaagacagatgggagttttgtggttcatgatataccttctggatcttatgtagtggaagttgtatctccagcttacagatttgatcccgttcgagtggatatcacttcgaaaggaaaaatgagagcaagatatgtgaattacatcaaaacatcagaggttgtcagactgccctatcctctccaaatgaaatcttcaggtccaccttcttactttattaaaagggaatcgtggggctggacagactttctaatgaacccaatggttatgatgatggttcttcctttattgatatttgtgcttctgcctaaagtggtcaacacaagtgatcctgacatgagacgggaaatggagcagtcaatgaatatgctgaattccaaccatgagttgcctgatgtttctgagttcatgacaagactcttctcttcaaaatcatctggcaaatctagcagcggcagcagtaaaacaggcaaaagtggggctggcaaaaggaggtagtcaggccgtccagagctggcatttgcacaaacacggcaacactgggtggcatccaagtcttggaaaaccgtgtgaagcaactactataaacttgagtcatcccgacgttgatctcttacaactgtgtatgttaactttttagcacatgttttgtacttggtacacgagaaaacccagctttcatcttttgtctgtatgaggtcaatattgatgtcactgaattaattacagtgtcctatagaaaatgccattaataaattatatgaactactatacattatgtatattaattaaaacatcttaatccagaaaaaaaaaaaaaaaaaaaaaaaa

SEQ ID NO: 14868 - DNA, 1928 bp, Homo sapiens
gagcagaacagggaggctagagcgcagcgggaaccggcccggagccggagccggagccccacaggcacctactaaaccgcccagccgatcggcccccacagagtggcccgcgggcctccggccgggcccagtcccctcccgggccctccatggcccgggccgctgccctcctgccgtcgagatcgccgccgacgccgctgctgtggccgctgctgctgctgctgctcctggaaaccggagcccaggatgtgcgagttcaagtgctacccgaggtgcgaggccagctcgggggcaccgtggagctgccgtgccacctgctgccacctgttcctggactgtacatctccctggtgacctggcagcgcccagatgcacctgcgaaccaccagaatgtggccgccttccaccctaagatgggtcccagcttccccagcccgaagcctggcagcgagcggctgtccttcgtctctgccaagcagagcactgggcaagacacagaggcagagctccaggacgccacgctggccctccacgggctcacggtggaggacgagggcaactacacttgcgagtttgccaccttccccaaggggtccgtccgagggatgacctggctcagagtcatagccaagcccaagaaccaagctgaggcccagaaggtcacgttcagccaggaccctacgacagtggccctctgcatctccaaagagggccgcccacctgcccggatctcctggctctcatccctggactgggaagccaaagagactcaggtgtcagggaccctggccggaactgtcactgtcaccagccgcttcaccttggtgccctcgggccgagcagatggtgtcacggtcacctgcaaagtggagcatgagagcttcgaggaaccagccctgatacctgtgaccctctctgtacgctaccctcctgaagtgtccatctccggctatgatgacaactggtacctcggccgtactgatgccaccctgagctgtgacgtccgcagcaacccagagcccacgggctatgactggagcacgacctcaggcaccttcccgacctccgcagtggcccagggctcccagctggtcatccacgcagtggacagtctgttcaataccaccttcgtctgcacagtcaccaatgccgtgggcatgggccgcgctgagcaggtcatctttgtccgagaaacccccagggcctcgccccgagatgtgggcccgctggtgtggggggccgtgggggggacactgctggtgctgctgcttctggctggggggtccttggccttcatcctgctgagggtgaggaggaggaggaagagccctggaggagcaggaggaggagccagtggcgacgggggattctacgatccgaaagctcaggtgttgggaaatggggaccccgtcttctggacaccagtagtccctggtcccatggaaccagatggcaaggatgaggaggaggaggaggaggaagagaaggcagagaaaggcctcatgttgcctccacccccagcactcgaggatgacatggagtcccagctggacggctccctcatctcacggcgggcagtttatgtgtgacctggacacagacagagacagagccaggcccggccctcccgcccccgacctgaccacgccggcctagggttccagactggttggacttgttcgtctggacgacactggagtggaacactgcctcccactttcttgggacttggagggaggtggaacagcacactggacttctcccgtctctagggctgcatggggagcccggggagctgagtagtggggatccagagaggacccccgcccccagagacttggttttggctccagccttcccctggccccgtgacactcaggagttaataaatgccttggaggaaaacaaaaaaaaaaaaaaaaaaaaaa

SEQ ID NO: 14869 - DNA, 1410 bp, Homo sapiens
ctggagaggatctacccgggtccctgcctggccagtggggaaacaccggtcccccaggcaccttcacctaaccagagcggggatttccaccgcccctcatgccgccctttggaggaaagtgaaagtgaaaggaggaagaggaggcttcatggctgaggaggtcgcagcgccatgaagtccctgtctctgctcctcgctgtggctttgggcctggcgaccgccgtctcagcaggacccgcggtgatcgagtgttggttcgtggaggatgcgagcggaaagggcctggccaagagacccggtgcactgctgttgcgccagggaccgggggaaccgccgccccggccggacctcgaccctgagctctatctcagtgtacacgaccccgcgggcgccctccaggctgccttcaggcggtatccccggggcgcccccgcaccacactgcgagatgagccgcttcgtgcctctccccgcctctgcgaaatgggccagcggcctgacccccgcgcagaactgcccgcgggccctggatggggcttggctgatggtcagcatatccagcccagtcctcagcctctccagcctcttgcgaccacagccagagcctcagcaggagcctgttctcatcaccatggcaacagtggtactgactgtcctcacccacacccctgcccctcgagtgagactgggacaagatgctctgctggacttgagctttgcctacatgccccccacctccgaggccgcctcatctctggctccgggtccccctccctttgggctagagtggcgacgccagcacctgggtaagggacatctgctcctggctgcaactcctgggctgaatggccagatgccagcagcccaagaaggggccgtggcatttgctgcttgggatgatgatgagccatggggcccatggaccggaaatgggaccttctggctgcctacagttcaaccctttcaggagggcacctatctggccaccatacacctgccatacctgcaaggacaggtcaccctggagcttgctgtgtacaaaccccccaaagtgtccctgatgccagcaacccttgcacgggccgccccaggggaggcacccccggaattgctctgccttgtgtcccacttctacccttctgggggcctggaggtggagtgggaactccggggtggcccagggggccgctctcagaaggccgaggggcagaggtggctctcggccctgcgccaccattccgatggctctgtcagcctctctgggcacttgcagccgcccccagtcaccactgagcagcatggggcacgctatgcctgtcgaattcaccatcccagcctgcctgcctcggggcgcagcgctgaggtcaccctggaggtagcaggtaagagctgggagctctgcggaatctga

SEQ ID NO: 14870 - DNA, 3629 bp, Homo sapiens
ctggagaggatctacccgggtccctgcctggccagtggggaaacaccggtcccccaggcaccttcacctaaccagagcggggatttccaccgcccctcatgccgccctttggaggaaagtgaaagtgaaaggaggaagaggaggcttcatggctgaggaggtcgcagcgccatgaagtccctgtctctgctcctcgctgtggctttgggcctggcgaccgccgtctcagcaggacccgcggtgatcgagtgttggttcgtggaggatgcgagcggaaagggcctggccaagagacccggtgcactgctgttgcgccagggaccgggggaaccgccgccccggccggacctcgaccctgagctctatctcagtgtacacgaccccgcgggcgccctccaggctgccttcaggcggtatccccggggcgcccccgcaccacactgcgagatgagccgcttcgtgcctctccccgcctctgcgaaatgggccagcggcctgacccccgcgcagaactgcccgcgggccctggatggggcttggctgatggtcagcatatccagcccagtcctcagcctctccagcctcttgcgaccacagccagagcctcagcaggagcctgttctcatcaccatggcaacagtggtactgactgtcctcacccacacccctgcccctcgagtgagactgggacaagatgctctgctggacttgagctttgcctacatgccccccacctccgaggccgcctcatctctggctccgggtccccctccctttgggctagagtggcgacgccagcacctgggtaagggacatctgctcctggctgcaactcctgggctgaatggccagatgccagcagcccaagaaggggccgtggcatttgctgcttgggatgatgatgagccatggggcccatggaccggaaatgggaccttctggctgcctacagttcaaccctttcaggagggcacctatctggccaccatacacctgccatacctgcaaggacaggtcaccctggagcttgctgtgtacaaaccccccaaagtgtccctgatgccagcaacccttgcacgggccgccccaggggaggcacccccggaattgctctgccttgtgtcccacttctacccttctgggggcctggaggtggagtgggaactccggggtggcccagggggccgctctcagaaggccgaggggcagaggtggctctcggccctgcgccaccattccgatggctctgtcagcctctctgggcacttgcagccgcccccagtcaccactgagcagcatggggcacgctatgcctgtcgaattcaccatcccagcctgcctgcctcggggcgcagcgctgaggtcaccctggaggtagcaggtctttcagggccctcccttgaggacagcgtaggccttttcctgtctgcctttcttctgcttgggctcttcaaggcactgggctgggctgctgtctacctgtccacctgcaaggattcaaagaagaaagcagagtgagggcactcactgccatcctgtggaagccaccatcatctctggcccaagcttctgtagtagctccctaaaataataccctatcatctgctcctaatccctccaatctctctccactgagtggctggaatgcttttttttttttctttcacttatataagggataatttttcttttttttttttttttgagacggagtctcactcttccgcccaggctgcagtgcagtggcatgatcttggcttactgcaacctccgcctcctgggttcaagcaattctgtggcttcagcctccggagtagctgggattacaggcacatgccaccacacccagtgaatttttgtatttttagtagagacggggtttcaccatgttggccaggctggtcttgaattcctgacctcaggtgatctgcccacctcagcctcccaaagtgctgggattacaggcgtgagccaccacaccaggcccgagaaatgcttttttaaaaaacacacatcttatggcattcaccttcttggagctctaggacagtggttctcaaaatttttttctctcaggacctcttaaaaatcatcaaggaccccaaaaagcttttgggtatgtgggttatagctatcaatatttatggtactagaacttaaaagtgagaaaaatttaaaacacgagaatacataggcacacattctattcatcgtgggaaccatggtgtcaatacatatcatgtagcttctgaaaaactccactgtacacttatagaatgaagaaggcaaaaaacttttttttttttttttttgagacggagtctcgctctgtcgcccaggctggagtgcagtggcgcgatctcggctcactgcaagctccgcctctcgggttcacgccattctcctgcctcagcctcccaagtagctcggactacaggcgtcctccaccatgcctggctaatattttgtattttttagtagagacggggtttcaccgtgttagccaggatggtctcgatctcctaacctggtgatccgcccgcctcggcctcccaaagtattgggattacccgcgtgagccaccgcgcccggctgcaaataatctttctttttttctgagacagagtctcgctctgttgcccaggctggagtgcagtggcacgatctcggctcacggcacgctccgcctcccgggttcacgccattctcctgcctcagcttcccgagtagctgggactacaggggcccgccaccacgcccggctaactttttgtgtttttagtagagacggggtttcaccgtgttagccaggatggtctcgatctcctgaccttgtgatctgcccgcctcggcctcccaaagtgctgggattacaggcgtgagccaccgcgcccggcggcgaaacacgatattgtactaacatcttaattttgttataaaatctcacaaaccccctgacatagtctcagagatctgtagggccgaggttacatttggagaacccgtactctagggccaaatccattcttcttgccctggctcacttgtcccccccaccgccccgcgctggagccactgcctagttcttcagccctagatggtgctcgccagacctcctctcaatgctcatcacacacagggctattcctttcctccaatgaaccaaacgcctcccgcccacctccaggtcccagtcctctgttccctttgcctggtccacccttgccctccctgggtcgcagacgaggtcggcctcgtcattccccgcagaccgccgcgcgtccctcttgtgcggttcaccacagttgtatttaagtgatcgtgtgagtcgtcgttaaatgcctgtctccccgcggatcatgggctcctcgaggacagggactggcctgtctgtccactgctgtaaccccgcgccggcatagggacctaaggcccactggagggcgctcatcaagtagctgctggatgttgacgaaggaagcggcggcgcagctcagggatctccgagtcaggacggtcggccagacccacggggtaacgggtctaatcgtgtaggaataaagctgtattccagtgcttccaaaaaaaaaaaaaaaaaaaaaaaaaaaaaaaaaaaaaaaaaaaaaaaa

SEQ ID NO: 14871 - DNA, 2839 bp, Homo sapiens
gtagtcccggagtccgcgtgcgcggggccgggtccgggagccccagggcagccgccccgccgagtcgcaggcacagcgtcaccttcgtcccctccggagctgcacgtggcctgagcaggatggtgccctccagcccagcggtggagaagcaggtgcccgtggaacctgggcctgaccccgagctccggtcctggcggcacctcgtgtgctacctttgcttctacggcttcatggcgcagatacggccaggggagagcttcatcaccccctacctcctggggcccgacaagaacttcacgcgggagcaggtcacgaacgagatcacgccggtgctgtcgtactcctacctggccgtgctggtgcccgtgttcctgctcaccgactacctgcgctacacgccggtgctgctgctgcaggggctcagcttcgtgtcggtgtggctgctgctgctgctgggccactcggtggcgcacatgcagctcatggagctcttctacagcgtcaccatggccgcgcgcatcgcctattcctcctacatcttctctctcgtgcggcccgcgcgctaccagcgtgtggccggctactcgcgcgctgcggtgctgctgggcgtgttcaccagctccgtgctgggccagctgctggtcactgtgggccgagtctccttctccacgctcaactacatctcgctggccttcctcaccttcagcgtggtcctcgccctcttcctgaagcgccccaagcgcagcctcttcttcaaccgcgacgaccgggggcggtgcgaaacctcggcttcggagctggagcgcatgaatcctggcccaggcgggaagctgggacacgccctgcgggtggcctgtggggactcagtgctggcgcggatgctgcgggagctgggggacagcctgcggcggccgcagctgcgcctgtggtccctctggtgggtcttcaactcggccggctactacctggtggtctactacgtgcacatcctgtggaacgaggtggaccccaccaccaacagtgcgcgggtctacaacggcgcggcagatgctgcctccacgctgctgggcgccatcacgtccttcgccgcgggcttcgtgaagatccgctgggcgcgctggtccaagctgctcatcgcgggcgtcacggccacgcaggcggggctggtcttccttctggcgcacacgcgccacccgagcagcatctggctgtgctatgcggccttcgtgctgttccgcggctcctaccagttcctcgtgcccatcgccacctttcagattgcatcttctctgtctaaagagctctgtgccctggtcttcggggtcaacacgttctttgccaccatcgtcaagaccatcatcactttcattgtctcggacgtgcggggcctgggcctcccggtccgcaagcagttccagttatactccgtgtacttcctgatcctgtccatcatctacttcttgggggccatgctggatggcctgcggcactgccagcggggccaccacccgcggcagcccccggcccagggcctgaggagtgccgcggaggagaaggcagcacaggcactgagcgtgcaggacaagggcctcggaggcctgcagccagcccagagcccgccgctttccccagaagacagcctgggggctgtggggccagcctccctggagcagagacagagcgacccatacctggcccaggccccggccccgcaggcagctgaattcctgagcccagtgacaaccccttccccctgcactctgtgctccgcccaagcctcaggccctgaggctgcagatgagacttgtccccagctggctgtccatcctcctggtgtcagcaagctgggtttgcagtgtcttccaagcgacggtgttcagaatgtgaaccagtgactctcgggcgcccctgtggtaactttgcaggcggccctcagtgcatccccacgacccctgcctcgagggccgcctgccttagcaatgggggcctccgcttatcctgctagcaggccccctaggattccccctgccctgtgccgcactctggcggtggccacagcgtgctggcgacactcagggcagctgcctggccatgctgtccctgcactgtgccccgcgggctttgttgctggaagaggtgggtggtgggcttctgcgtccaccaggcctcactggctcatgccccttggggggcttgagacaaatcctttctgccccccagggctagtgaagtggcctcttggataccagctcaggggacactggccccacaggagttgtgagccctctagggcagggtgggagccgggaccctcaggtgtagctgagctgtgacattgctggtcatccttggtgctcttgcttttttgaaagatgctttttttttttttaactgacgtagaatgaagaactgcatgtggcttctctgtctctgtggaaaagccatctcaggttggcggcagacacattgtcatcagaggggagcagcggctctggtcctcggagctggttcctctctcccaccctaagggcagccctccatggtcctgtctgtccttctgaagtgtgtccatcctgacctgcgggtcctcagctgctcccacacttgtgccagcccggaggggactggtcccggtcaccgcggacgtgctggccttggtatgtgccaggcttgcctgggctgggcagccttgggggggctgcctttgtggtgggcgctggggaagtacgtcccagcggcctcagggtctaaggagcgctagtgccttgcccacaggtgcgggaccatctgatgtgatgtgaatactcttcccacatacattaaacacacttaagtgaga

SEQ ID NO: 14872 - DNA, 2481 bp, Homo sapiens
atggcggagccctcggccccggagagcaagcacaagtcgtccctcaactcgtccccgtggagtggcctcatggccctgggaaacagccggcacggccaccacgggcccggggcccagtgcgcgcacaaggcggcgggcggcgcggcgccgccgaagccggccccggcggggctgtccggggggctgtcgcagccggctgggtggcagtcgcttctctccttcaccatcctcttcctggcctggcttgccggcttcagctcgcgcctcttcgccgtcatccgcttcgaaagcatcatccacgagttcgacccgtggtttaactatagatcaacacatcatcttgcatctcatgggttctatgaatttttaaattggtttgatgaaagagcatggtatccactaggaagaatagtaggtggtactgtttacccagggttgatgataaccgctggccttattcattggattttaaatacattgaacataactgttcacataagagacgtatgtgtgttccttgcaccaacttttagcggccttacatctatatctactttcctgcttacaagagaactttggaaccaaggagcaggacttttagctgcttgttttattgctattgtaccaggctacatatctcggtcagtagctggatcctttgataatgaaggcattgctatttttgcacttcagttcacatactatttatgggtaaaatctgtaaaaactgggtcagttttttggacaatgtgctgctgcttatcctatttctatatggtctctgcttggggtggttatgtatttatcatcaatcttattccactgcatgtatttgtgttgttactgatgcagagatacagcaaaagagtctacatagcatatagcactttctacattgtgggtttaatattatcaatgcagataccttttgtgggattccagccaatcagaacaagtgaacacatggcagctgcaggtgtctttgcattgctgcaagcttatgctttcttgcagtatctgagagaccgattaacaaaacaagagttccagacccttttctttttgggtgtatcactagctgcaggtgctgtgttccttagtgtcatctatttgacttatacaggttacattgcaccatggagtggcaggttttattcattgtgggatactgggtatgcaaaaatacacattccaattattgcatcagtgtctgagcatcaacctacgacttgggtgtctttcttctttgatctacatattcttgtatgtaccttcccagcaggcctttggttctgcatcaaaaatatcaacgatgaaagagtatttgttgctctatatgcaatcagtgctgtctactttgctggagtgatggtgcgactgatgttgactttgactccagtcgtgtgtatgctgtctgcaattgccttttcaaatgtttttgagcactatttgggggatgacatgaaaagggaaaatccacctgtggaggacagcagtgatgaggatgacaaaagaaaccaaggaaatttgtatgataaggcaggtaaagtgaggaaacatgcaactgaacaggaaaaaactgaagagggattaggccctaatataaaaagcattgtcaccatgttgatgctgatgctattgatgatgtttgctgtccactgtacctgggtcacaagcaatgcctactctagtccaagtgtagtcctggcctcatacaatcatgatggcaccaggaatatcttagatgattttagagaagcttacttttggctaaggcaaaatacagatgaacatgcacgagtaatgtcttggtgggattatggctatcagatagctggaatggctaatagaactacgttggtggataataacacctggaataacagccacatagcactggtgggaaaagctatgtcttctaatgaaacagcagcctataaaatcatgaggactctagatgtagattatgttttggttatttttggaggggttattggctattctggtgatgatatcaacaaatttctctggatggttaggatagctgaaggagaacatcccaaagacattcgggaaagtgactattttaccccacagggagaattccgtgtagacaaagcaggatcccctactttgttgaattgccttatgtataaaatgtcatactacagatttggagaaatgcagctggattttcgtacacccccaggttttgaccgaacacgtaatgctgagattggaaataaggacattaaattcaaacatttggaagaagcctttacatcagaacactggcttgttaggatatataaagtaaaagcacctgataacagggagacattagatcacaaacctcgagtcaccaacattttcccaaaacagaagtatttgtcaaagaagactaccaaaaggaagcgtggctacattaaaaataagctggtttttaagaaaggcaagaaaatatctaagaagactgtttaa

SEQ ID NO: 14873 - DNA, 4289 bp, Homo sapiens
agcagcgacagagccttcctcaaacctgtagtgactgccacactttgcaaggacaccgtagagggggcatgtccgcgctccaacttcctcccgacgcagcctctgattggctcctgggcttataagaaacgcgtgaatgagcagctgccgcgggcagaaagttgccggaggtctccgggtggtatcgccctttcctctttgccagcccgctggcgagccgagccagggcaagatgaggtcgtcctgtgtcctgctcaccgccctggtggcgctggccgcctattacgtctacatcccgctgcctggctccgtgtccgacccctggaagctgatgctgctggacgccactttccggggtgcacagcaagtgagtaacctgatccactacctgggactgagccatcacctgctggcactgaattttatcattgtttcttttggcaaaaaaagcgcgtggtcttctgcccaagtgaaggtgaccgacacagactttgatggtgtggaagtcagagtgtttgaaggccctccgaagcccgaagagccactgaaacgcagcgtcgtttatatccacggaggaggctgggccttggcaagtgcaaaaatcaggtattatgatgagctgtgtacagcaatggctgaggaattgaatgctgtcattgtttccattgaatacaggctagttccaaaggtttattttcctgagcaaattcatgatgttgtacgggccacaaagtatttcctgaagccagaagtcttacagaagtatatggttgatccaggcagaatttgcatttctggtgacagtgctggtggaaatctggctgctgcccttggacaacagtttactcaagatgccagcctaaaaaataagctcaaactacaagctttaatttatccagttcttcaagctttagattttaacacaccatcttatcagcaaaatgtgaacaccccaatcctgccccgctatgtcatggtgaagtattgggtggactacttcaaaggcaactatgactttgtgcaggcaatgatcgttaacaatcacacttcacttgatgtggaagaggctgctgctgtcagggcccgtctaaactggacatccctcttgcctgcatccttcacaaagaactacaagcctgttgtacagaccacaggcaatgccaggattgtccaggagcttcctcagttgctggatgcccgctccgccccactcattgcagaccaggcagtgctgcagctcctcccaaagacctacattctgacgtgtgagcatgatgtcctcagagacgatggcatcatgtatgccaagcgtttggagagtgccggtgtggaggtgaccctggatcactttgaggatggctttcacggatgtatgattttcactagctggcccaccaacttctcagtgggaatccggactaggaatagttacatcaagtggctagatcaaaacctgtaaaggagcaaaacttccagaagcctcgagcccctcttgacctcctacacctgctttggaaagacatgcactttttagttgactaattcttcctcccattcccctctacttgcgagttatggaatttctattccataactgaagtctttatgataacctaatttttaaaaatgaatttgactaacttaagtgcaaaacatgtaaatttggttcccagagtgggccaatctctctgttcttgttatcttagccaactatactgatacctacagctacagaaagcaggactaggaactggaaataactttgggtcctgccttcattaggacgttctttttagaagcagttcttccagctctggatcatagagtgacctttaataagttaaaaaaacgaggactccttaattctgctagagttaaccttgagttcagagcagtattaaatgcgtgcactttcaggtcagtactggggaccaagtaccctctggtcttttgtgaatggatggttttgtttcctatgggaattttggcaaaggttttctggaaagaacaagtttctcaaaggactttcttcctctagaatgttcattttatgagatcgctatctgtaagtccagttggattacaggaatacttgaaagttactttctaccactattagaaaatatgaagtcgcatgcactggatatctatatatcattaggtttttgttgtgtttttggttatgctgtcccccttctccttggggagatatttgggagcaaacttatttagatttagagtaaacttttcattatagagcaagtaaaaacagacaaatgaaacaacctagtgtttcacataaaaatacttctgacataaagtaccaagagcagtgtgaatatacttggcatagtcaaaaaagaaaatacatttaatattagttcaaaattgttaaaaatacctttagaaggtctagtctattattgaaaactcaattttttcacttatatggctttaaaatggagctattttgctacaatataatgtattgtttatttttttaagttatttaatgttaatatacatagctagacttaaggtttttcagaaagatgtccataataaatattaaaaacaatggtattttttaaaaaactgccttagggttttaaaaccttccctacagttataaccacgtgtaattttgtggaaatgatataacagctattaatactactataacataggcataaatattttcgtgtttatatgcatatacaagttaaaataattagaaactatgactgcgcctagtaaagtcatctaggtttatagttcagtagcttaggcaaggcacacactgctcatctccgctttttagggtcagaggaacacaagctcatgttctgagtgaagggcgtacactggcacctggtgttgcctagatcccccatctcctccttccagccaggtctggaagtttcaacagcccaagcttaacttcatgtaaagtcttcactgccagtgggaacatctttgacacaacaagacactccaattgtgatttgagttgaggatctctgcctgccttcctgccgtccttccttcttccccgatccatgctacttttaggggctgcggagagcagcagcagagctgagtaatgatacagggcaccacggagagaaagtagaaccatttcactcctgggaagatggggtatttcccacttccagcaacgaaataacaaatgaaaagttgcatacttattgatgtattgtatgagccagtagcattttatgtacaaaacagaagtcaatgcaacagtatgtatgtgtgcctgtgtgtgtataaaaataaccattgaagctaacttgctaatgtacttaggcaagccacttcccatctctgggcctcgtctttcctccctctaaaatcaaagagctgaattatgtgatccttgaggtctcttccacttataataccaactgtcttgtcagactggcaaattatattggcctctccttatgtggtggtttttttggtaggtcatagttccttatacacagacacctgcatcatcgaaggtctttttttcctaaaaaaaaaaaatgggattttagttcttattctgtgataactatcctcctcatataatactattctttttgacaccatttgaaggaaccaatatttggaccttattttgaggttgtctgtctcgaagaaaaagaaaataaaatgtataggcagggttccttcaattggcattttccccagaattgtgagccaaagcctatagtaattgcagacagcaaatgattccggatctctaaaaggctctctcagatgaaaagggagtaaaggaaaaaagaggtcaaccactgtttctgataatgtacttgagtttcattgttcttttagtttgtattcttataaaaaatgtttacactctgcagattgattttttttttttagtactgtggctttcttttcctattttatgaaaaaaatgataatctttttgtaaaattgtctgtgaaatataaacattaatatataaagaaaaaccttgaagtgctgtatagtgaagtataaattaatgttttattgatttgtgaagaatttaagactattatataattatcttggtggatctattttatgcatgaccttttaacctttgactttgcttatttcccactacgaaggggaaggtagattttatgaatgattttaatagcaaatatattttataaagtgaaaatccagtgtggaggtagcaaagcatctatctattctgaatcatgtttggaaataaaattgctccatctgggaatgtgctttca

SEQ ID NO: 14874 - DNA, 2228 bp, Homo sapiens
acacgcctttcttattggataccggcttttcatggggccgagcgccgctgggtaggcggaagtagccgcaggcatggcggcggctatgccgcttgctctgctcgtcctgttgctcctggggcccggcggctggtgccttgcagaacccccacgcgacagcctgcgggaggaacttgtcatcaccccgctgccttccggggacgtagccgccacattccagttccgcacgcgctgggattcggagcttcagcgggaaggagtgtcccattacaggctctttcccaaagccctggggcagctgatctccaagtattctctacgggagctgcacctgtcattcacacaaggcttttggaggacccgatactgggggccacccttcctgcaggccccatcaggtgcagagctgtgggtctggttccaagacactgtcactgatgtggataaatcttggaaggagctcagtaatgtcctctcagggatcttctgcgcctctctcaacttcatcgactccaccaacacagtcactcccactgcctccttcaaacccctgggtctggccaatgacactgaccactactttctgcgctatgctgtgctgccgcgggaggtggtctgcaccgaaaacctcaccccctggaagaagctcttgccctgtagttccaaggcaggcctctctgtgctgctgaaggcagatcgcttgttccacaccagctaccactcccaggcagtgcatatccgccctgtttgcagaaatgcacgctgtactagcatctcctgggagctgaggcagaccctgtcagttgtatttgatgccttcatcacggggcagggaaagaaagactggtccctcttccggatgttctcccgaaccctcacggagccctgccccctggcttcagagagccgagtctatgtggacatcaccacctacaaccaggacaacgagacattagaggtgcacccacccccgaccactacatatcaggacgtcatcctaggcactcggaagacctatgccatctatgacttgcttgacaccgccatgatcaacaactctcgaaacctcaacatccagctcaagtggaagagacccccagagaatgaggcccccccagtgcccttcctgcatgcccagcggtacgtgagtggctatgggctgcagaagggggagctgagcacactgctgtacaacacccacccataccgggccttcccggtgctgctgctggacaccgtaccctggtatctgcggctgtatgtgcacaccctcaccatcacctccaagggcaaggagaacaaaccaagttacatccactaccagcctgcccaggaccggctgcaaccccacctcctggagatgctgattcagctgccggccaactcagtcaccaaggtttccatccagtttgagcgggcgctgctgaagtggaccgagtacacgccagatcctaaccatggcttctatgtcagcccatctgtcctcagcgcccttgtgcccagcatggtagcagccaagccagtggactgggaagagagtcccctcttcaacagcctgttcccagtctctgatggctctaactactttgtgcggctctacacggagccgctgctggtgaacctgccgacaccggacttcagcatgccctacaacgtgatctgcctcacgtgcactgtggtggccgtgtgctatggctccttctacaatctcctcacccgaaccttccacatcgaggagccccgcacaggtggcctggccaagcggctggccaaccttatccggcgcgcccgaggtgtccccccactctgattcttgccctttccagcagctgcagctgccgtttctctctggggaggggagcccaagggctgtttctgccacttgctctcctcagagttggcttttgaaccaaagtgccctggaccaggtcagggcctacagctgtgttgtccagtacaggagccacgagccaaatgtggcatttgaatttgaattaacttagaaattcatttcctcacctgtagtggccacctctatattgaggtgctcaataagcaaaagtggtcggtggctgctgtattggacagcacagaaaaagatttccatcaccacagaaaggtcggctggcagcactggccaaggtgatggggtgtgctacacagtgtatgtcactgtgtagtggatggagtttactgtttgtggaataaaaacggctgtttccgtggtt

SEQ ID NO: 14875 - DNA, 2733 bp, Homo sapiens
gtaggtgcgtgcccgggactctgccgatgcgggccgcgccccctggggccaagagactccacgtcccgctcagggcaaagggtgtggggagaagcggtcacgcccctcggctggaatccgtgaggaccaggtctttttcagtgtgctcaatatggtcaccaagcctggaaacatagagtctcaccctgttgcttaggcagatggcgcgatctcggctcctgggttcaagcaattctcctgcctcagcctcctgaatagccgggattacagtcgtccagcatgctctgcccaccccacgccgaggtgcactgaccatgagcctcaactcctccctcagctgcaggaaggagctgagtaatctcactgaggaggagggtggcgaagggggcgtcatcatcacccagttcatcgccatcattgtcatcaccatttttgtctgcctgggaaacctggtcatcgtggtcaccttgtacaagaagtcctacctcctcaccctcagcaacaagttcgtcttcagcctgactctgtccaacttcctgctgtccgtgttggtgctgccttttgtggtgacgagctccatccgcagggaatggatctttggtgtagtgtggtgcaacttctctgccctcctctacctgctgatcagctctgccagcatgctaaccctcggggtcattgccatcgaccgctactatgctgtcctgtaccccatggtgtaccccatgaagatcacagggaaccgggctgtgatggcacttgtctacatctggcttcactcgctcatcggctgcctgccacccctgtttggttggtcatccgtggagtttgacgagttcaaatggatgtgtgtggctgcttggcaccgggagcctggctacacggccttctggcagatctggtgtgccctcttcccctttctggtcatgctggtgtgctatggcttcatcttccgcgtggccagggtcaaggcacgcaaggtgcactgtggcacagtcgtcatcgtggaggaggatgctcagaggaccgggaggaagaactccagcacctccacctcctcttcaggcagcaggaggaatgcctttcagggtgtggtctactcggccaaccagtgcaaagccctcatcaccatcctggtggtcctcggtgccttcatggtcacctggggcccctacatggttgtcatcgcctctgaggccctctgggggaaaagctccgtctccccgagcctggagacttgggccacatggctgtcctttgccagcgctgtctgccaccccctgatctatggactctggaacaagacagttcgcaaagaactactgggcatgtgctttggggaccggtattatcgggaaccatttgtgcaacgacagaggacttccaggctcttcagcatttccaacaggatcacagacctgggcctgtccccacacctcactgcgctcatggcaggtggacagcccctggggcacagcagcagcacgggggacactggcttcagctgctcccaggactcagggacagatatgatgctgcttgaggactacacgtctgatgacaaccctccctctcactgcacttgcccacccaagagaaggagctcggtgacatttgaggatgaagtggaacaaatcaaagaagctgccaagaactcgattcttcatgtgaaagctgaagtacacaagtccttggacagttacgcagcaagcttggccaaagccattgaggccgaagccaaaatcaacttatttggggaggaggctttgccaggggtcttggttacagcacggactgtcccggggggcggcttcgggggccgccgaggcagcagaactcttgtgagccagaggctgcagttgcagagcatcgaagaaggagatgttttagctgccgagcagagatgagggcctcagggtgccgtggggctgcagcctgagaggctggcccggggaggagttcccatcaccgcctgtgccgcggccttgggagcatgtcactgtgtacagctggccacacacagggaaggagcagcatctggtatgcagccaccaggacaaggactgaaaataatgtctacagtccacagcttcagcatttccagagaccacatgtgagcttcttttaggtcccagtgatgggaccagaagcatctaaagcaaaaaaaaaaccaaaaaaaaatctagagatgtggctgtggctttttgggaggtggggcatgggaggaccagagacgaagggcttggaaggagacccccacatgcatcatttcctcctcttcacagtgtgctgggagtccagccgtgcactgtgccagatgcctcaggaggagaaccctccccagtgtactgtgaaggatgacacagcacttcttcctaatgacacgcgaccgtcctggtgcctctacatggttgatgcgggcagtgtgggaccctcagttctaggactggtccgcagagaaagcacccaggagcagagcgcttcggagcggtcctcagtggcgccacctgctggtgctaatagggacagccacaggcctcttgcagactggcccaccctgcctacttccctactgacaagttctttggtatttcaaaagggagaaaccactataaaagacaagaggaagggcaggtactaggtgtttcatttccagaattaaaaaaaaaatccatttaaaaaaaaaaaaaaaaaaaaaaaaaaaaaaaaaaaaaaaaaaaaaaaaaaaaaaaaaaa

SEQ ID NO: 14876 - DNA, 1382 bp, Homo sapiens
ggccttatctttccagtcgtccagcatgctctgcccaccccacgccgaggtgcactgaccatgagcctcaactcctccctcagctgcaggaaggagctgagtaatctcactgaggaggagggtggcgaagggggcgtcatcatcacccagttcatcgccatcattgtcatcaccatttttgtctgcctgggaaacctggtcatcgtggtcaccttgtacaagaagtcctacctcctcaccctcagcaacaagttcgtcttcagcctgactctgtccaacttcctgctgtccgtgttggtgctgccttttgtggtgacgagctccatccgcagggaatggatctttggtgtagtgtggtgcaacttctctgccctcctctacctgctgatcagctctgccagcatgctaaccctcggggtcattgccatcgaccgctactatgctgtcctgtaccccatggtgtaccccatgaagatcacagggaaccgggctgtgatggcacttgtctacatctggcttcactcgctcatcggctgcctgccacccctgtttggttggtcatccgtggagtttgacgagttcaaatggatgtgtgtggctgcttggcaccgggagcctggctacacggccttctggcagatctggtgtgccctcttcccctttctggtcatgctggtgtgctatggcttcatcttccgcgtggccagggtcaaggcacgcaaggtgcactgtggcacagtcgtcatcgtggaggaggatgctcagaggaccgggaggaagaactccagcacctccacctcctcttcaggcagcaggaggaatgcctttcagggtgtggtctactcggccaaccagtgcaaagccctcatcaccatcctggtggtcctcggtgccttcatggtcacctggggcccctacatggttgtcatcgcctctgaggccctctgggggaaaagctccgtctccccgagcctggagacttgggccacatggctgtcctttgccagcgctgtctgccaccccctgatctatggactctggaacaagacagttcgcaaagaactactgggcatgtgctttggggaccggtattatcgggaaccatttgtgcaacgacagaggacttccaggctcttcagcatttccaacaggatcacagacctgggcctgtccccacacctcactgcgctcatggcaggtggacagcccctggggcacagcagcagcacgggggacactggcttcagctgctcccaggactcaggtaacctgcgtgctttataagcctctcacctgtcgcgttttccctgtgttgcgtttcccccgtgtcgcgtttcccctgtgcaggctcaagagctggcggaggggcatttcccacggtg

SEQ ID NO: 14877 - DNA, 6160 bp, Homo sapiens
tcaggccggcagcggggagccgagtggaggctaattttacttgctgggagcgaggagagtaatcctcctgccccccactcctgccccgccccctggctggctcagcagggcagctcagccgacagcctcagccagcctagtccccaaggcgggggcattggggacacagggaagggaaagcactggggtgggggagcaggagaaagccagattcccagggaagccatggagccatcctcaccccaggatgaaggcctgaggaagaaacagcccaagaagccagttcctgagattctgccaaggccaccccgggctttgttctgcctgaccctggagaaccccctgaggaaggcctgcatcagcattgtagaatggaagcccttcgagacgatcatcttgctcaccatctttgccaattgtgtggccctggccgtgtacctgcccatgccggaagatgacaacaactctctgaacctcggcctggagaagctggagtatttcttcctcattgtcttctcgattgaagccgccatgaagatcattgcctacggcttcttattccaccaggacgcttacctgcgcagtggctggaatgtgctggacttcaccattgtcttcctgggggtcttcaccgtgattctggaacaggttaacgtcatccaaagccacacagccccaatgagcagcaaaggagccggcttggatgtcaaggccctcagagccttccgagtgctcagacccctccggctggtgtcgggggtgcctagcctgcaggtggtcctgaactccatcttcaaggccatgctccccctctttcacatcgccctgctggtcctctttatggtcatcatctatgccatcatcgggctggagctcttcaagggcaagatgcacaagacctgctacttcattggtacagatatcgtggccacggtggagaatgaagagccatcgccctgcgccaggacgggctcagggcgccggtgcaccatcaatggcagtgagtgccggggcggctgcccagggcccaaccatggcatcacccacttcgacaacttcggcttctccatgctcaccgtgtaccagtgcattaccatggagggatggactgacgtcctttactgggtcaatgatgccatcgggaatgagtggccctggatctattttgtcaccctcattttgctgggatccttcttcatcctcaacctggtgctgggtgtcctgagtggggaattcaccaaggagcgggagaaggccaagtccaggggaaccttccagaagctccgggagaagcagcaactagatgaggaccttcggggctacatgagctggatcacgcagggcgaggtcatggatgttgaggacttcagagaaggaaaactgtctttggatgaaggtggctctgacacagagagcctgtatgaaattgcaggcttgaacaaaatcatccagttcatccgacattggaggcagtggaaccgcatctttcgctggaagtgccatgacatcgtgaagtccaaggtcttctattggctggtgattctcatcgttgccctcaacaccctgtctatcgcctcagagcaccacaaccagccgcactggctgacccgtttgcaagacattgccaaccgggtgctgctgtccctcttcaccactgagatgctgatgaagatgtacgggctgggcctgcgccagtacttcatgtctatcttcaaccgcttcgactgcttcgtggtgtgcagcggtatcctggagatcctgctggtggagtcgggcgccatgacacccctgggcatctccgtgctccgctgcatccgcctcctgaggatcttcaagatcaccaaatattggacgtcgctgagcaacctggtggcatccctgctcaactccatccgctccatcgcctccctgctgctgctgctcttcctcttcatcgtcatcttccgcctcctgggcatgcagctctttggggggaggtatgactttgaagacacagaagtacggcgcagcaactttgacaactttccccaagccctcatcagcgtcttccaggtactgacaggggaagactggacctcaatgatgtacaatgggatcatggcctcgagcgggccgtcctaccctggcatgcttgtgtgcatttacttcatcatccttttcgtctgtggcaactacatcctgctcaatgtcttcctggccattgccgtggacaacctggccgaggcggagagcctgacttctgcccagaaggccaaggctgaggagaaaaaacgcaggaagatgtccaagggtctcccagacaagtcagaagaggagaagtcaacgatggccaagaagctggagcagaaacccaagggtgagggcatccccaccactgccaagctgaaaatcgatgagtttgaatctaatgtcaatgaggtgaaggatccctacccctcagccgacttcccaggggatgacgaggaagatgagcctgagatcccgctgagcccccgaccacgtcccctggctgagctgcagctgaaagagaaggccgtgcccattccagaagccagctccttcttcatcttcagccccaccaataagatccgtgtcctgtgtcaccgcatcgtcaatgccacctggttcaccaacttcatcctgctcttcatcctgctcagcagcgctgcactggctgcggaagaccccatccgggctgattccatgagaaatcagatccttaaacactttgacatcgggttcacctctgtcttcactgtggagattgtcctcaagatgacgacctacggagccttcctgcacaagggttccttctgccgcaattacttcaacatgctggacctgctggtggtggccgtgtccctcatctccatgggacttgagtccagtgccatctccgtggtgaagatcctgagggtgctgagggtgctccgaccactcagagccatcaacagagccaaggggttgaagcacgtggctaggtgcatgttcgtggccatcagcaccatcgggaacatcgtgctggtcactaccctcctacagttcatgtttgcctgcatcggcgtccagctcttcaaggggaagttcttcaggtgcaccgacttgtccaagatgacagaggaggagtgcaggggctactactacgtgtacaaggacggggaccccatgcagatagagctgcgtcaccgcgagtgggtacacagcgacttccacttcgacaatgtgctctcagccatgatgtccctcttcacggtctccaccttcgagggatggcctcagctgctgtacaaggccatagactccaatgcggaggacgtgggtcccatctacaacaaccgtgtggagatggccatcttcttcatcatctacatcatcctcattgccttcttcatgatgaacatctttgtgggcttcgtcattgtcaccttccaggagcagggagagactgagtacaagaactgtgagctggacaagaaccagcgccaatgtgtacagtatgccctgaaggcccgcccactgaggtgctacattcccaaaaacccataccagtaccaggtgtggtacattgtcacctcctcctactttgaatacctgatgtttgccctcatcatgctcaacaccatctgcctcggcatgcagcactacaaccagtcggagcagatgaaccacatctcagacatcctcaatgtggccttcactatcatcttcaccctggagatgatcctcaagctcatggccttcaaggccaggggctactttggaaacccctggaatgtgtttgacttcctgattgtcattggcagcatcattgatgtcatcctcagtgagatcgacactttcctggcctccagcgggggactgtattgcctgggtggaggctgcgggaacgttgacccagatgagagtgcccgcatctccagcgccttcttccgcctgttccgtgtcatgaggctgatcaagctgctgagccgggcagaaggagtgcgaaccctcctgtggacgttcatcaagtccttccaggccctaccctacgtggctctgctcatcgtcatgctcttcttcatctacgctgtcatcggcatgcagatgtttgggaagatcgccttggtggatgggacccaaataaaccggaacaacaacttccagaccttcccacaagctgtgctactgctcttcaggtgtgcaacaggtgaggcctggcaggagatcctactggcctgcagctatgggaagctgtgtgacccagagtcggactatgccccaggggaggagtacacatgtggcaccaactttgcatactactacttcatcagcttctacatgctctgtgccttcctggtcatcaacctctttgtggctgtcatcatggacaattttgactacctcacccgggactggtccatcctgggccctcatcacctggatgagttcaaggccatctgggcagagtatgacccagaggctaaggggaggatcaaacacctggacgtggtgaccctgctgagaaggattcagccccctctgggctttgggaagttctgcccacatcgggtagcttgtaagcggctggtgggcatgaacatgcccctgaacagcgacggcacagtcaccttcaatgccacactctttgccctggtccgcacggcactcaagatcaagacggaaggtaactttgagcaggccaacgaggagctgagggccatcatcaagaagatctggaagagaaccagcatgaagctcttggaccaggtcatccctccaataggagatgatgaggtgacagtggggaagttctacgccacattcctcatccaggagcacttccggaagttcatgaaacgccaagaggagtattatggctatcggcccaagaaggacattgtacagatccaggcagggctgcggaccattgaggaagaggcagcccccgagatctgtcgcacggtctcaggagacctggctgctgaggaggagctggagagagccatggtggaggctgcgatggaggaggggatattccggaggactggaggcctgtttggccaggtggacaacttcctggaaaggaccaactccctgccccctgtcatggccaatcagagacccctccagtttgctgagatagagatggaagagatggagtcacctgtcttcttggaggacttcccacaagatccacgcaccaaccccctggctcgtgccaataccaacaatgccaacgccaatgtcgcctatgcgaacagcaaccatagcaacagccatgtgttttccagtgtccactatgaaagggagttcccagaagagacagagacgcctgctaccagaggacgagcccttggccaaccctgcaggtccctgggaccccacagcaaaccctgtgtggagatgctgaagggactgctgacccagagggcaatgcccagaggccaggcacctcctgccccctgccagtgccccagggtggagtcctccatgcctgaggacagaaagagctccacaccagggtctcttcatgaggagacaccccacagcaggagcaccagggagaatacttccaggtgctcagcaccagctacagccctgctgatccaaaaggctctggttcgagggggcctgggcaccttggcagctgatgcaaacttcatcatggcaacaggccaggccctcggagatgcctgccaaatggaaccagaggaagtggagatcatggcaacagagctactgaaaggacgagaggccccagacggcatggccagctccctgggatgcctgaacctcgggtcctccctgggcagcctcgaccaacaccagggctcccaggagacccttattcctccaaggctgtgatgcccacacagcatcagcatgggcttagagctggcatgaccaatgggggtggggaagttgctggggtggagaagggctagcccaccgcagcagcctccctccctctcagcagctagatgcatgcctgaggcagggtggtcaggaaccacctcaaaaagtgcggaggaagtagctggacaggccctgcccctcaccagcaagaggcatgattggatggagcttctaatgtcattcaaaaaggcctggtcagtgcctgtccctagggccactcccacctgcaggacattaaaatctccaggcctgtgacactggc

SEQ ID NO: 14878 - DNA, 5002 bp, Homo sapiens
aggagggggttgggaggggagaggacgcgggcgaggaagaccagccccggggccccgatgttgtgactgtgacagactcactggggtttgtacatgctggggaggagccttcctttcaggggtgaccacattcatctgggcatgcctgcagtactcttggcccatggacctgaaggagaagcacctgggcgagcctccctcagccctgggcctgtccacgcggaaggccctcagcgtcctgaaggagcagctggaggcagtgctggaaggacatctcagggagcggaagaagtgtctgacgtggaaggaggtgtggagaagcagcttcctccaccacagtaaccgctgctcctgcttccactggccgggggcctcactcatgctactggccgtgctgctgctgctgggctgctgcgggggacagccagccgggagccgtggggtggggctggtgaatgcctcggccttgttcctgttactgcttctcaaccttgtgctcatcgggcggcaagaccggctgaagcgtcgggaggtagagcggaggctgcgagggatcattgaccaaatccaagatgccctcagggatggcagggagatccagtggcccagtgccatgtatccagacctccacatgccttttgcgccatcctggtccttgcactgggcctacagagacggacacctggtcaacctgccagtcagcctgctggttgaaggagacatcatagctttgaggcctggccaggaatcgtttgcttctctgagggggatgaaggatgacgagcacatcgtcctggagccgggagacctcttcccccccttctcccctccaccctcaccccggggagaagtggagagagggccacagagcccccagcagcaccggcttttccgtgtccttgagacccctgtgattgacaacatcagatggtgcctggacatggccctgtcccgaccagtcactgccctggacaatgagcggttcacagtgcagtcggtgatgctacactatgctgtgcccgtggtcctggccggcttcctcatcaccaatgccctgcgcttcatcttcagtgccccgggggtcacttcctggcagtacaccctcctccagctccaggtgaatggcgtcctgcccatcctccccctgctctttccagtcctctgggttctggcaactgcctgtggagaggcccgtgtcctggcccagatgagcaaggcctcacccagctccctgctggctaagttctcagaggatactctcagcagctatacggaggctgtctcctctcaggaaatgctgcgctgcatttggggccacttcctgagggtgctcggggggacatcgccaacgctgagccacagttccagcctgctgcacagcctgggctctgtcacggtcctgtgctgtgtggacaaacaggggatcctgtcatggccaaatcccagcccagagactgtactgttcttcagcgggaaggtggagccccctcacagcagccatgaggacctcaccgatggcctatccacccgctccttctgccatcccgagccccatgaacgagacgccctcttggctggctccctgaacaacaccctgcacctttccaatgagcaggagcgtggcgactggcctggcgaggctcccaagccccccgagccctattcacaccacaaagcgcatggccgcagcaaacacccatctggctccaacgtgagcttcagcagggacaccgagggtggtgaagaagagcccagcaagacccagcctgggatggagagcgacccctacgaagcagaggactttgtgtgtgactaccacctggagatgctgagcctgtcccaggaccagcagaacccctcctgcatccagtttgatgactccaactggcagctgcacctcacctccctcaaacccctgggcctcaatgtgctgctgaacctgtgtgatgccagcgtcaccgagcgcctgtgccgattctccgaccacctgtgcaacattgccctgcaagagagccacagcgccgtgctgcccgtccatgtgccctggggcctctgcgagcttgcccgcctcattggcttcactcctggggccaaggagcttttcaagcaggagaaccatctggcgctgtaccgcctccccagtgccgagacaatgaaggagacatcgctggggcggctctcctgtgtcaccaagcggcggcctcccctcagccacatgatcagcctcttcattaaagacaccaccaccagcacagagcagatgctgtcccatggcaccgctgatgtggtcttagaggcctgcacagacttctgggacggagctgacatctaccctctctcgggatctgacagaaagaaagtgctggacttctaccagcgagcctgcctgtctgggtattgctctgccttcgcctacaagcccatgaactgcgccctgtcctctcagctcaatggcaagtgcatcgagctggtacaggtgcccggccaaagcagcatcttcaccatgtgcgagctgcccagcaccatccccatcaagcagaacgcccgccgcagcagctggagctctgacgaagggatcggggaggtgctggagaaggaagactgcatgcaggccctgagcggccagatcttcatgggcatggtgtcctcccagtaccaggcccggctggacatcgtgcgcctcattgatgggcttgtcaacgcctgcatccgctttgtctacttctctttggaggatgagctcaaaagcaaggtgtttgcagaaaaaatgggcctggagacaggctggaactgccacatctccctcacacccaatggtgacatgcctggctccgagatccccccctccagccccagccacgcaggctccctgcatgatgacctgaatcaggtgtcccgagatgatgcagaagggctcctcctcatggaggaggagggccactcggacctcatcagcttccagcctacggacagcgacatccccagcttcctggaggactccaaccgggccaagctgccccggggtatccaccaagtgcggccccacctgcagaacattgacaacgtgcccctgctagtgccccttttcaccgactgcaccccagagaccatgtgtgagatgataaagatcatgctagagtacggggaggtgacctgctgcctgggcagctctgccaacctgcggaacagctgcctcttcctccagagcgacatcagcattgccctggatcccctgtacccatcccgttgctcctgggagacctttggctacgccaccagcatcagcatggcccaggcctcggatggcctttctcccctgcagctgtcagggcagctcaacagcctgccctgttccctgacctttcgccaggaggagaccatcagcatcatccggcttatcgaacaggctcggcatgccacctatggcatccgtaagtgcttcctcttcctgctgcagtgccagctgactcttgtggtcatccagttcctttcttgcctggtccagctgccgccactcctgagtaccaccgacatcctgtggctgtcctgcttttgctaccctctgctcagcatctctctgctcgggaagcccccccatagctccatcatgtctatggcaacggggaaaaacctccagtccattcccaagaagacccagcactacttcctgctctgcttcctgctcaagttcagcctcaccatcagctcctgcctcatctgctttggcttcacactgcagagcttctgtgacagctcccgggaccgcaacctcaccaactgctcctccgtcatgctgcccagcaacgacgacagggctccagcctggtttgaggactttgccaatggactgctgtcggctcagaagctcacggcagccctgattgtcctgcacactgtcttcatttccatcacccatgtgcatcgcaccaagcccctgtggagaaagagccccttgaccaacctctggtgggccgtgacagtgcctgtggtgctgctgggtcaggtggtccagacggctgtggacctgcagctgtggacacacagggacagccacgtccactttggcctggaggacgtgcccctgctgacatggctcctgggctgcctgtccctggtccttgtggtggtgaccaatgagatcgtgaagctacatgagattcgggtccgagtccgctaccagaagcgacagaagctgcagtttgaaactaagctgggcatgaactctcccttctgagccactggctgtggtggctgtagttgcccccgtccctggggctaaagccagacccatttctgaacaggggagtttgtatcatgaatgtttccaggtttgctcctgcacccgtggcactggaaacccagctccccgtgtcagaccccgctgtcttcctgagccctggggctcactgtggaggagctgacggcctgggcccttggccagtcctggctcttccctgggcctcaccagggacactcttgaatgtatggcctcaggcgctccctagagggggcctaaaccccctcacctgtgagctaccccctttagggatcccttgcccccttggagatcccttgccccccagtgcctctgctcgtgggtccctggacacggccttgaagccaaccttctttggaggagcaacagcagcagccttggccgacgcgtccaactcccaaggctgccgtggagggcaggggggtggtgcttgcctggatgtggccccgagtgcctcccctccctccctctgtgggggagtctcccgcctgaacctgaagatggagcagggcccccgcttcgccctggagcctcttcctgtgcctggctcaagctggctgcctgtcagtcttggggaatctggcccaggtctcctcagcctctgccccagttctgggagaagtttctactggtgtatattttttactggaaatgagccttttaggaatgaatgtagactggtttgtattaaaatgtgtcaattgctaaggaaaaaaaaaaaaaaaa

SEQ ID NO: 14879 - DNA, 3829 bp, Homo sapiens
tcccactcggctcctcttacggagtcctcattccaccccccttgtttccgcattcatcctgagtggctggtgggaacgtgaaaagggagaggaaaaggcgcaagaagccagagagaggggtgtgggaaaagcgaaaacaggctgccaaatcaggggattccttccaatttaaaaaggaagtctgctgacgttagttagttaaatttaacatctttttatgtgtaacacttgactttggaagcaaaaatgaactttgcggagagagagggctctaagagatactgcattcaaacgaaacatgtggccattctctgtgcggtggtggtgggtgtaggattaatagtgggacttgccgtgggcttgaccagatcgtgtgactccagcggggacggcgggccgggcactgcgccagctccttcccacctgccttcttccacggccagcccctcaggtcctcctgcccaggaccaggacatctgcccggccagtgaggatgagagcggacagtggaaaaactttcgactgccggacttcgtcaacccagtccactacgacctgcacgtgaagcccctgttggaggaggacacctacacgggcaccgtgagcatctccatcaacctgagcgctcccacccggtacctgtggctgcacctccgggagaccaggatcacccggctcccggagctgaagaggccctctggggaccaggtgcaagtccggaggtgtttcgagtacaaaaagcaggagtacgtggtggtcgaggcggaggaagagcttacccccagcagtggagatggcctgtatctcctgaccatggagttcgccggctggctgaacggctccctcgtgggattttatagaaccacctacacggagaacggacgagtcaagagcatagtggccaccgatcatgaaccaacagatgccaggaaatcttttccttgttttgatgagcccaacaaaaaggcaacttatacaatatctatcacccatcccaaagaatacggagcactttcaaatatgccagtggcgaaagaagagtcagtggatgataaatggactcgaacaacttttgagaagtctgtccccatgagcacgtacctggtgtgctttgctgtacatcaatttgactctgtaaagagaatatcaaatagtggaaaacctcttacaatttatgtccagccagagcaaaagcacacagccgaatatgctgcaaacataactaaaagtgtgtttgattattttgaagaatactttgctatgaattattctcttcctaaattagataaaatcgctattccagattttggcactggtgccatggagaactggggactcatcacgtacagagaaacgaacctgctttatgaccctaaggaatcagcctcatcaaaccaacagagggtggccactgtggttgcccatgaacttgtgcatcagtggtttggaaatattgtgaccatggactggtgggaagacttgtggctaaatgaaggatttgcttctttctttgagtttctgggagtaaaccatgcagaaacagactggcaaatgcgtgaccaaatgttacttgaagatgtattacctgttcaagaggatgattctttgatgtcttcgcatccaattattgtgactgtgacaacccctgatgaaataacatctgtttttgatggaatatcctatagcaagggatcttctattttgagaatgcttgaagactggataaaaccagagaattttcaaaaaggatgtcagatgtacttggaaaaataccaattcaagaatgcaaaaacttctgatttttgggcagcactggaagaggcaagtaggctaccagtgaaagaagtaatggacacctggaccagacagatgggttatcctgtgcttaacgtgaacggtgtcaagaacatcacacagaaacgctttttgttggacccaagagctaacccttctcagcccccttcagatcttggttatacatggaatatcccagttaaatggactgaagataatataacaagcagtgtgttatttaataggtcagaaaaagaaggaatcactttgaactcctctaatcctagtggaaatgcttttctcaaaataaacccagatcatattgggttttatcgtgtaaattatgaagtagcaacttgggactcgatagctacagcgctctccttgaaccacaagacattttcttcagcagatcgtgcaagtcttattgatgatgcttttgccttggcaagagctcaacttctagattataaggtggctttgaacttgaccaagtatctcaaaagggaagagaattttttaccatggcagagagtaatttcagctgtaacctacatcattagcatgtttgaagatgataaagagctatatcctatgattgaggaatacttccaaggtcaagtgaagcctattgcagattctctgggatggaatgatgctggagaccatgtcacaaagttactccgttcctccgtgttagggtttgcgtgcaagatgggagacagagaagccttgaacaatgcttcctcgttatttgagcagtggctaaatgggactgtaagccttcccgtaaatctcaggcttctggtgtatcggtatgggatgcagaactctggcaatgagatttcatggaactacactcttgagcaataccagaaaacttcattagctcaagaaaaagaaaaactgctgtatggattagcatcagtgaagaacgttactcttttgtcaaggtatttggatttgctcaaggacacgaaccttattaaaactcaggatgtgtttacagtcattcgatatatctcatataacagctatgggaagaacatggcctggaattggatacaactcaactgggactatctagtcaacagatatacactcaataacagaaaccttggccgaattgtcacaatagcagagccattcaacactgaactgcaactgtggcagatggagagcttttttgcaaaatatccacaagctggagcaggagaaaaacctagggaacaagtgctggaaacagtgaaaaacaatatagagtggctaaaacaacatagaaacaccatcagagaatggttttttaatttacttgagagtggttaatgtattcaaatgttagagtttaattttgtgaatctattgtttctcctctgaagcatttggtggcctaatttacaagcacgatggagagagccttataaacagataatgcttttactaagcactgtgtttatatgtcttgcaaagcctttaaattgttcctctttgtttatgaagaaagatactaatagagtacttaatatactcagggattccttctaagtgtacttcataagatattctttacaaactgaagataatgaaatagttattttaatacctttaaatatcattctttgtatcttaaatctgtgaagtagaacaatttggtcttagctttacattttcagtaccaaagaaacaccacttaatcttctctcttgattgatttttaaagtttaaataccagtacttgagggaccaatattaccatcttaatctttattttattattcagaattatacagacctaatatcattttattcacatatgtcttactactttaaatcctaccaaagtaacctgggcttaagttttacttgaggatcatatgaattagccaaaagaatggctgactgttgcctttactcttataaaatcaataagagaactctcctctttttttaaaaataaatctaaatgattatcttgaaaaagtattgttttccagtgtcacttgactcttgaataaaaataactgcagtgttcccc

SEQ ID NO: 14880 - DNA, 5608 bp, Homo sapiens
aagacggattctcagacaaggcttgcaaatgccccgcagccatcatttaactgcacccgcagaatagttacggtttgtcacccgaccctcccggatcgcctaatttgtccctagtgagaccccgaggctctgcccgcgcctggcttcttcgtagctggatgcatatcgtgctccgggcagcgcgggcgcagggcacgcgttcgcgcacaccctagcacacatgaacacgcgcaagagctgaaccaagcacggtttccatttcaaaaagggagacagcctctaccgcgattgtagaagagactgtggtgtgaattagggaccgggaggcgtcgaacggaggaacggttcatcttagagactaattttctggagtttctgcccctgctctgcgtcagccctcacgtcacttcgccagcagtagcagaggcggcggcggcggctcccggaattgggttggagcaggagcctcgctggctgcttcgctcgcgctctacgcgctcagtccccggcggtagcaggagcctggacccaggcgccgccggcgggcgtgaggcgccggagcccggcctcgaggtgcataccggacccccattcgcatctaacaaggaatctgcgccccagagagtcccgggagcgccgccggtcggtgcccggcgcgccgggccatgcagcgacggccgccgcggagctccgagcagcggtagcgcccccctgtaaagcggttcgctatgccggggccactgtgaaccctgccgcctgccggaacactcttcgctccggaccagctcagcctctgataagctggactcggcacgcccgcaacaagcaccgaggagttaagagagccgcaagcgcagggaaggcctccccgcacgggtgggggaaagcggccggtgcagcgcggggacaggcactcgggctggcactggctgctagggatgtcgtcctggataaggtggcatggacccgccatggcgcggctctggggcttctgctggctggttgtgggcttctggagggccgctttcgcctgtcccacgtcctgcaaatgcagtgcctctcggatctggtgcagcgacccttctcctggcatcgtggcatttccgagattggagcctaacagtgtagatcctgagaacatcaccgaaattttcatcgcaaaccagaaaaggttagaaatcatcaacgaagatgatgttgaagcttatgtgggactgagaaatctgacaattgtggattctggattaaaatttgtggctcataaagcatttctgaaaaacagcaacctgcagcacatcaattttacccgaaacaaactgacgagtttgtctaggaaacatttccgtcaccttgacttgtctgaactgatcctggtgggcaatccatttacatgctcctgtgacattatgtggatcaagactctccaagaggctaaatccagtccagacactcaggatttgtactgcctgaatgaaagcagcaagaatattcccctggcaaacctgcagatacccaattgtggtttgccatctgcaaatctggccgcacctaacctcactgtggaggaaggaaagtctatcacattatcctgtagtgtggcaggtgatccggttcctaatatgtattgggatgttggtaacctggtttccaaacatatgaatgaaacaagccacacacagggctccttaaggataactaacatttcatccgatgacagtgggaagcagatctcttgtgtggcggaaaatcttgtaggagaagatcaagattctgtcaacctcactgtgcattttgcaccaactatcacatttctcgaatctccaacctcagaccaccactggtgcattccattcactgtgaaaggcaaccccaaaccagcgcttcagtggttctataacggggcaatattgaatgagtccaaatacatctgtactaaaatacatgttaccaatcacacggagtaccacggctgcctccagctggataatcccactcacatgaacaatggggactacactctaatagccaagaatgagtatgggaaggatgagaaacagatttctgctcacttcatgggctggcctggaattgacgatggtgcaaacccaaattatcctgatgtaatttatgaagattatggaactgcagcgaatgacatcggggacaccacgaacagaagtaatgaaatcccttccacagacgtcactgataaaaccggtcgggaacatctctcggtctatgctgtggtggtgattgcgtctgtggtgggattttgccttttggtaatgctgtttctgcttaagttggcaagacactccaagtttggcatgaaagatttctcatggtttggatttgggaaagtaaaatcaagacaaggtgttggcccagcctccgttatcagcaatgatgatgactctgccagcccactccatcacatctccaatgggagtaacactccatcttcttcggaaggtggcccagatgctgtcattattggaatgaccaagatccctgtcattgaaaatccccagtactttggcatcaccaacagtcagctcaagccagacacatttgttcagcacatcaagcgacataacattgttctgaaaagggagctaggcgaaggagcctttggaaaagtgttcctagctgaatgctataacctctgtcctgagcaggacaagatcttggtggcagtgaagaccctgaaggatgccagtgacaatgcacgcaaggacttccaccgtgaggccgagctcctgaccaacctccagcatgagcacatcgtcaagttctatggcgtctgcgtggagggcgaccccctcatcatggtctttgagtacatgaagcatggggacctcaacaagttcctcagggcacacggccctgatgccgtgctgatggctgagggcaacccgcccacggaactgacgcagtcgcagatgctgcatatagcccagcagatcgccgcgggcatggtctacctggcgtcccagcacttcgtgcaccgcgatttggccaccaggaactgcctggtcggggagaacttgctggtgaaaatcggggactttgggatgtcccgggacgtgtacagcactgactactacagggtcggtggccacacaatgctgcccattcgctggatgcctccagagagcatcatgtacaggaaattcacgacggaaagcgacgtctggagcctgggggtcgtgttgtgggagattttcacctatggcaaacagccctggtaccagctgtcaaacaatgaggtgatagagtgtatcactcagggccgagtcctgcagcgaccccgcacgtgcccccaggaggtgtatgagctgatgctggggtgctggcagcgagagccccacatgaggaagaacatcaagggcatccataccctccttcagaacttggccaaggcatctccggtctacctggacattctaggctagggcccttttccccagaccgatccttcccaacgtactcctcagacgggctgagaggatgaacatcttttaactgccgctggaggccaccaagctgctctccttcactctgacagtattaacatcaaagactccgagaagctctcgagggaagcagtgtgtacttcttcatccatagacacagtattgacttctttttggcattatctctttctctctttccatctcccttggttgttcctttttctttttttaaattttctttttcttttttttttcgtcttccctgcttcacgattcttaccctttcttttgaatcaatctggcttctgcattactattaactctgcatagacaaaggccttaacaaacgtaatttgttatatcagcagacactccagtttgcccaccacaactaacaatgccttgttgtattcctgcctttgatgtggatgaaaaaaagggaaaacaaatatttcacttaaactttgtcacttctgctgtacagatatcgagagtttctatggattcacttctatttatttattattattactgttcttattgtttttggatggcttaagcctgtgtataaaaaagaaaacttgtgttcaatctgtgaagcctttatctatgggagattaaaaccagagagaaagaagatttattatgaaccgcaatatgggaggaacaaagacaaccactgggatcagctggtgtcagtccctacttaggaaatactcagcaactgttagctgggaagaatgtattcggcaccttcccctgaggacctttctgaggagtaaaaagactactggcctctgtgccatggatgattcttttcccatcaccagaaatgatagcgtgcagtagagagcaaagatggcttccgtgagacacaagatggcgcatagtgtgctcggacacagttttgtcttcgtaggttgtgatgatagcactggtttgtttctcaagcgctatccacagaacctttgtcaacttcagttgaaaagaggtggattcatgtccagagctcatttcggggtcaggtgggaaagccaagaacttggaaaagataagacaagctataaattcggaggcaagtttcttttacaatgaacttttcagatctcacttccctccgacccctaacttccatgcccacccgtccttttaactgtgcaagcaaaattgtgcatggtcttcgtcgattaataccttgtgtgcagacactactgctccagacgtcgtttccctgataggtagagcagatccataaaaaggtatgacttatacaattaggggaagctaatggagtttattagctgagtatcaatgtctctgcgttgtacggtggtgatgggttttaatgaatatggaccctgaagcctggaaatcctcatccacgtcgaacccacaggactgtgggaagggcagaatcaatccctaagggaaaggaaacctcaccctgagggcatcacatgcactcatgttcagtgtacacaggtcaagtcccttgctctgggctctagttgggagagtggtttcattccaagtgtactccattgtcagtatgctgtttttgtttccttcactccattcaaaaagtcaaaatacaaaatttggcacagcatgccaacgggaggctgtgcccagaccaagcactggaagtgtgcttctaggcatagtcattggttttgcaaaaagagggctcaaatttaaatagaaatttacagctatttgaatggtcagatataccaagaaagaaaaatatttctgttcctcaagaaaacttgctaccctctgtgaggggaattttgctaaacttgacatctttataacatgagccagattgaaagggagtgattttcattcatcttaggtcatgttatttcatatttgtttctgaaggtgcgatagctctgttttaggttttgcttgcgcctgttaattactggaacaccttatttttcattaaaggctttgaaagccaattctcaaaaattcaaaagtgcaaattaacagaacaaaaggaaatccagtagcaactgcagtcaagcgagggagttgacaagataaaccttacgtccattcaagttatatgctggcctatgagagatgagagttgggtcgtttgttctctttgttgatgattt

SEQ ID NO: 14881 - DNA, 1533 bp, Homo sapiens
tctgattggtgacgggtgaggcggcccgaaatcgtaggacttccgaaagcagcggcggcgtttgcttcactgcttggaagtgtgagtgcgcgaagatgcgaaaggtggttttgatcaccggggctagcagtggcattggcctggccctctgcaagcggctgctggcggaagatgatgagcttcatctgtgtttggcgtgcaggaacatgagcaaggcagaagctgtctgtgctgctctgctggcctctcaccccactgctgaggtcaccattgtccaggtggatgtcagcaacctgcagtcggtcttccgggcctccaaggaacttaagcaaaggtttcagagattagactgtatatatctaaatgctgggatcatgcctaatccacaactaaatatcaaagcacttttctttggcctcttttcaagaaaagtgattcatatgttctccacagctgaaggcctgctgacccagggtgataagatcactgctgatggacttcaggaggtgtttgagaccaatgtctttggccattttatcctgattcgggaactggagcctctcctctgtcacagtgacaatccatctcagctcatctggacatcatctcgcagtgcaaggaaatctaatttcagcctcgaggacttccagcacagcaaaggcaaggaaccctacagctcttccaaatatgccactgaccttttgagtgtggctttgaacaggaacttcaaccagcagggtctctattccaatgtggcctgtccaggtacagcattgaccaatttgacatatggaattctgcctccgtttatatggacgctgttgatgccggcaatattgctacttcgcttttttgcaaatgcattcactttgacaccatataatggaacagaagctctggtatggcttttccaccaaaagcctgaatctctcaatcctctgatcaaatatctgagtgccaccactggctttggaagaaattacattatgacccagaagatggacctagatgaagacactgctgaaaaattttatcaaaagttactggaactggaaaagcacattagggtcactattcaaaaaacagataatcaggccaggctcagtggctcatgcctataattccagcactttgggaggccaaggcagaaggatcacttgagaccaggagttcaagaccagcctgagaaacatagtgagcccttgtctctacaaaaagaaataaaaataatagctgggtgtggtggcatgcgcatgtagtcccagctactcagaaggatgaggtgggaggatctcttgaggctgggaggcagaggttgcagtgagctgagattgtgccactgcactccagcctgggtgacagcgagaccctgtctcaaaatatgtatatatttaatatatatataaaaccagagctgacaatgacactctggaacattgcataccttctgtacattctggggtacatggatttctactgagttggataatatgcatttgtaataaactatgaactatgaaaaaaaaaaaaaaa

SEQ ID NO: 14882 - DNA, 6551 bp, Homo sapiens
gcggccgcggcgagcggcgctgcccgggccgggcgcgcacggcgggcgccctgtgagcggccccgatgtggcaggaggcgatgcggcgccgccgctacctgcgggaccgctccgaggaggcggcgggcggcggagacgggctgccgcggtcccgggactggctctacgagtcctactactgcatgagccagcagcacccgctcatcgtcttcctgctgctcatcgtcatgggctcctgcctcgccctgctcgccgtcttcttcgcgctcgggctggaagttgaagaccatgtggcgtttctaataacagttccaactgccctggcgattttctttgcgatatttatcctggtctgcatcgagtctgtgtttaagaagctgctgcgcctcttctcgttggtgatatggatatgccttgttgccatgggatacctgttcatgtgttttggaggcaccgtctctccctgggaccaggtatcgttcttcctcttcatcatcttcgtggtgtacaccatgctgcccttcaacatgcgagacgccatcattgccagcgtcctcacctcctcctcccacaccatcgtgcttagcgtctgcctgtctgcaacaccgggaggcaaggagcacctggtctggcagatcctggccaatgtgatcattttcatctgtgggaacctggcgggagcctaccataagcacctcatggaactcgctcttcagcaaacatatcaggacacctgtaattgcatcaagtcgcggatcaagttggaatttgaaaaacgtcaacaggagcggcttctgctctccctgctgccggcccacatcgccatggagatgaaagcggagatcatccagaggctgcagggccccaaggcgggccagatggagaacacaaataacttccacaacctgtatgtgaagcggcatacaaacgtgagcatcttatacgctgacatcgttggctttacccggctggcaagtgactgctccccgggagaactagtccacatgctgaatgagctctttggaaagtttgatcaaattgcaaaggagaatgaatgcatgagaattaaaattttaggagactgctactactgtgtatctggactccctatatctctccctaaccatgccaagaactgtgtgaaaatggggctggacatgtgtgaagccataaagaaagtgagggatgctactggagttgatatcaacatgcgcgtgggcgtgcattctgggaatgtcctgtgtggcgtgattggtctgcagaagtggcaatatgatgtgtggtcacatgatgtgaccttggccaaccacatggaagctggaggggtccctggacgtgttcacatttcttctgtcaccctggagcacttgaatggcgcttataaagtggaggagggagatggtgacattagggacccatatttaaaacagcacctggtgaaaacctactttgtgatcaaccccaagggagaacgacggagcccccagcatctcttcagacctcgccacacccttgatggagccaaaatgagggcctcggtccgcatgacccggtacttggagtcctggggggcagccaagccctttgcacacctacatcacagggacagcatgaccacagagaacggcaagatcagcaccacggatgtacccatgggtcagcataattttcaaaatcgcaccttaagaaccaagtcacaaaagaagagatttgaagaagaattgaatgaaaggatgattcaagcaattgatgggattaatgcacagaagcaatggctcaagtctgaagacattcagagaatctcactgcttttctataacaaagtactagaaaaagagtaccgggccacggcactgccagcgttcaagtattatgtgacttgtgcctgtctcatattcttctgcatcttcattgtgcagattctcgtgctgccaaaaacgtccgtcctgggcatctcctttggggctgcgtttctcttgctggccttcatcctcttcgtctgctttgctggacagcttctgcaatgcagcaaaaaagcctctcccctgctcatgtggcttttgaagtcctcgggcatcattgccaaccgcccctggccacggatctctctcacgatcatcaccacagccatcatattaatgatggccgtgttcaacatgtttttcctgagtgactcagaggaaacaatccctccaactgccaacacaacaaacacaagcttttcagcctcaaataatcaggtggcgattctgcgtgcgcagaatttatttttcctcccgtactttatctacagctgcattctgggactgatatcctgttccgtgttcctgcgggtaaactatgagctgaagatgttgatcatgatggtggccttggtgggctacaacaccatcctactccacacccacgcccacgtcctgggcgactacagccaggtcttatttgagagaccaggcatttggaaagacctgaagaccatgggctctgtgtctctctctatattcttcatcacactgcttgttctgggtagacagaatgaatattactgtaggttagacttcttatggaagaacaaattcaaaaaagagcgggaggagatagagaccatggagaacctgaaccgcgtgctgctggagaacgtgcttcccgcgcacgtggctgagcacttcctggccaggagcctgaagaatgaggagctataccaccagtcctatgactgcgtctgcgtcatgtttgcctccattccggatttcaaagaattttatacagaatccgacgtgaacaaggagggcttggaatgccttcggctcctgaacgagatcatcgctgactttgatgatcttctttccaagccaaaattcagtggagttgaaaagattaagaccattggcagcacatacatggcagcaacaggtctgagcgctgtgcccagccaggagcactcccaggagcccgagcggcagtacatgcacattggcaccatggtggagtttgcttttgccctggtagggaagctggatgccatcaacaagcactccttcaacgacttcaaattgcgagtgggtattaaccatggacctgtgatagctggtgtgattggagctcagaagccacaatatgatatctggggcaacactgtcaatgtggccagtaggatggacagcaccggagtcctggacaaaatacaggttaccgaggagacgagcctcgtcctgcagaccctcggatacacgtgcacctgtcgaggaataatcaacgtgaaaggaaagggggacctgaagacgtactttgtaaacacagaaatgtcaaggtccctttcccagagcaacgtggcatcctgaagagtcaccttcattttggcaagaagactgtattttcaggaaggtatcacacactttctgactgcaacttctgtcccttgtttttgatgtgcgtgctgtctgtcctatggagcctctgcagactcgttctcgtgacccagtggcataccgtttggtgtctgatgtgtgcccagatcgttctgccacttgcactgtgcttgctcctaagcaaaagggaaaaggagcgcgcgtgatagaagaaaagcactgggagaactaacagaggagaaaggtgaaacacacacacattcttaaggcaataaaactagggggtgtatattatcttctggtgcatgttcttttctggaaaatatggtagctcgccaaccgcatctgctcatctgatattcaaacacacagtattcgtgaataagttgattctgtcccccacgtggactctgtgctcacccattgtctcattgccagtggtgtccaagggcccccgttgggacccacggctctcgtccctctgctccgtgtgtctcatgccagcagcacgtcgccatccgtcaccagaattagtcctcacagcctaggaccagttttgtatcaaactcgtctgatgttttgatgccatttgtcttttgtaaagttaattcattaaaagttttatgtactttgatttacagtgcctgtatcttttattttcctgtcttctttctcctgtggtttgctccagaattaaggtttgttttccatccattctcccttttgacacagttgtttcagaaagagctctccagaagccaatattgagatgtaattcagattaggacacagtgtgtgacgcagataactggttactcagctccctggaaagcaggcaagcatgttgaatgtatctagtggtctgattttaatttgggcatctctagagaacgctttcagggaaaaatactttaatagtaaaaagattctctgcgagcaacagtgccccctccgtccactacgctcctgtctccaagaatgttttgctagagctaacagacatagactgcaaaagaataatttggaatcagctatgcaaatcagtctcacaatagcgtgagctaactgagagaagtactaagacccacaaactgcctgttaagtctgagaaggctaaagaagacacacagccaacgttcatgcatttttaaagacagaaggccttgaagaatttgttcttgtaaatccaacacaagttgtttggtacttttaacataaagaaatcatactttgccaaatagtgaaaagtagagcaatcgtgtataagctaatgtttaaaagcaaaactgcaaattgtagcccagttggtcaaacttgttttctttttataactcatggcaggcatctgtaagaagtagagaacccagatgatctcttaggaagccttttattcgtgggaactcgaacttgaagcacaagttcctggtttgaatcctggctctgattttttactggctgtgtgactttgaacacatctcttagtccctcttaggagtactttccttattggcaacttatggactcgctagtgattaaacgaggcaatgactgtgagcgagcctggcaggtgccccgtggtacattcacagcacgggcacagctgctgtgccaggactgtgactcattcccagtaaaaggcacttatcgaagctgataaccgtccttcatcaccgaagtgtgagtagagcatgacttatttagtattctgcctcaatggggaattttttgatcctgtaatcacaactcagcattggccttaatatacctaaatctccaaaaacagtgattaaagcaagagaattattacaagggcttttctctttcctctaactcattcttcacggatgccgtagcgtttccgtgagctcaaactggccttggtgtaaaatgtgtaaggatgagcagcaggcgtgcctcgtgggttcttcctctgttacatcctgctacactcatccgcaggtcaccttagttcacctaccctgagtgaacacccccagctgggtggtccaccaagttctcataaacagagtccctcccattcccccacggggtgcaccgaacttgggtttgcgctaaaaagaactcaaaaggagaactgtgctctcccaaagccatatcaccagtcttaccaaacaataggcttttaaaagcattgagtcattgtcagaatccactatgggaagctctgtgtgtacctggtcccttctaggtgtggtcccataggagcagccttagcatcccctgtgaacttatcaaaaatgcaaattctcaggccccaacctgaaggaggaccctgaatttgagatccccggggctggggcccagcacaactgctgtttagtgaacaggttctccaggtgattctgatccctgatcaagcttcagacctccctccctccccagtgtttttgcaggtgaggaaacaggggcagagtaattcaggcacatgtgttcagagttccacagttgattagcagttgaggccaggctagaatggaaaactgcctgttccttgaatctgaaagagcattattcctggtcaaagctccttaaagttctgggcagctaaaagcatccctgtgagcaaaaatgccaggcagaaaactggcagtgcacctctcatcagcccaggtcccagtgccattggcttcaagaaaaaaaaaaaatctctccccaatgctctccttaacctttaagtcttacaggaagcctctcatagaaattgcctccagtccagtttcccaaaaaccccagtgttttacatatctgtttaggagtgtctaagttttgtcatcaatccaggatgttattcttccttcccaactcactgtgctcctaaaggcagcaaccattcatctttcctttgctctggatacaccgaatgaccaggtaacatcatcaggccgggtgcagtggctcctataatcccaatattttgggaggccgaggagagaggatcacttaagcccaggagtctgagaccagcctgggcaacatagcaagacccccatctctgcaaaaaaataagaaaattagcttggcatggtggcacgtgcctgtagtcccagctacatgggaggctgaggtgggaggatcacttgagcccaggaagtccagaacgtagtgagccttgattataccactgcactccagcctgggtgacagagcgagactctgtctcag

SEQ ID NO: 14883 - DNA, 6859 bp, Homo sapiens
agaagctcccggccgggggcgcgcacgtaggcacgcagaggccgtcacgtgggtcgccgaggctcgcaagtgcgcgtggccgtggcggctggtgtggggttgagtcagttgtgggacccggagctgctgacccagcgggtggcccaccgaaccggtgacacagcggcaggcgttagggctcgggagccgcgagcctggcctcgtcctagagctcggccgagccgtcgccgccgtcgtcccccgcccccagtcagcaaaccgccgccgcgggcgcgcccccgctctgcgctgtctctccgatggcgtccgcctcaggggccatggcgaagcacgagcagatcctggtcctcgatccgcccacagacctcaaattcaaaggccccttcacagatgtagtcactacaaatcttaaattgcgaaatccatcggatagaaaagtgtgtttcaaagtgaagactacagcacctcgccggtactgtgtgaggcccaacagtggaattattgacccagggtcaactgtgactgtttcagtaatgctacagccctttgactatgatccgaatgaaaagagtaaacacaagtttatggtacagacaatttttgctccaccaaacacttcagatatggaagctgtgtggaaagaggcaaaacctgatgaattaatggattccaaattgagatgcgtatttgaaatgcccaatgaaaatgataaattgaatgatatggaacctagcaaagctgttccactgaatgcatctaagcaagatggacctatgccaaaaccacacagtgtttcacttaatgataccgaaacaaggaaactaatggaagagtgtaaaagacttcagggagaaatgatgaagctatcagaagaaaatcggcacctgagagatgaaggtttaaggctcagaaaggtagcacattcggataaacctggatcaacctcaactgcatccttcagagataatgtcaccagtcctcttccttcacttcttgttgtaattgcagccattttcattggattctttctagggaaattcatcttgtagagtgaagcatgcagagtgctgtttctttttttttttttctcttgaccagaaaaagatttgtttacctaccatttcattggtagtatggcccacggtgaccatttttttgtgtgtacagcgtcatataggctttgcctttaatgatctcttacggttagaaaacacaataaaaacaaactgttcggctactggacaggttgtatattaccagatcatcactagcagatgtcagttgcacattgagtcctttatgaaattcataaataaagaattgttctttctttgtggttttaataagagttcaagaattgttcagagtcttgtaaatgttattttaataatccctttaaattttatctgttgctgttacctcttgaaatatgatttatttagattgctaatcccactcattcaggaaatgccaagaggtattccttggggaaatggtgcctcttacagtgtaaatttttcctcctttacctttgctaatatcatggcagaatttttcttatcccttgtgaggcagttgttgactgagtttttcatccttacaatcctgtcccatggtatttaacataaaaaaaaataaaactgttaacagattcttgctcgatagcttgtttgtgtctgtcgtgttattagagggaactccactatatatggtcacttgaaattatgatgcaaaggtttctcttgcattgaaaccctcttggatattacagtatttttaattgaaagtcctaattctgttaaggaaaggagttgattaaattttaaggtaccactggtattttgggagattataatcagtttgttttcaagataatagaaaataaggtccatgagaatagaagttatgtgatttcagtgagttgatgtgtacagcatggctgtgctccatctgatttaccccattcttaagttctgagagtatgttctcaaggaagatttaactctctttggttttaaattactttttaaccagcctaataaataagtcttactacttttcataatatttcataatagttaaaagtaggtgtttttttcgtgctcaatttggcactcaaaataatgttcattatggaagtttggtaatactgagcaagcctgtggaattttctttatgaaaaatgattttagcctttgcaaatgttaaccatgtgaaacacattttcagtataagtatgcgttacagggtttgatactttcctgcacttaggtttgtcctattcttcatttattcatactaggatagaaaattttggaatcagaaaatagatccagtgtttagctacatacaatctagtacaagtgaatttttattcttaaacataggtgtgttggctctttttttaaaagatgcgctctacctgaaaaggaaattggattttagaactggatgtggtgcagtgaagtattttaggcccaggtctgtgtacacattttatagaagaatgaagtactctgaagtattttggttgccttttcatttcaactgtgttttgaatttgtcagatcacacatatattgtgttattgggcgctgtggtatcttttataaaacctcttgcttgtgtgcaaaagttcctaaaaggaaacacaagtaatgcctatccattactagcatgctatgctgcatgctttactgccattgctgtatgctttactgtctttgtaaaaatccccctctccccttttctggtaactggaaaagcatgctaaaaatagtcttatattttcaccccataaatgcagaatcagtaattccttggcttaaagctcttatataatcaatattattggtggtaaataccaagtttggtatctcatagctatctttttttaaagaaattaagttcttgaaaatttagccaaatcccgttttatgggaatgctctttagaattcattttgttcagcccctttgttctatggttgagaaatctgaggccttacgaaggttaagagaactttccccgtgtctcacaggtaggtagaggcagagctggaactagatatctggtctgttgactctagctcagtgtcttctggtaactgttgaaaattgtcttagtttgagagatggctgaaataatgaacataaaatgctatttataataacaagtatatgtgaaatttcttattgtaagactactaccggcttactgttgaatagtttggttatagtgtttaggctagaaatgcctcccacattggtaataaacattacaaaatacaatgtatttttaggtaggcattttataaaatgcattatgccatggttgcttttgagatagattgtagtctgggtagcatctttaaaatgtatgtgggcttaactgttgttcatatcaggagatgctctgattgtataggtgagactctgtttctgttatttttaattgctgtatgaaatgtgatcagattattttactaccaacagttatagtttgaaagtccaactgtattaattgactgataatatgataatatagagattaaattgtttgtcttcattccttatatgtttagaagtttttgctttgtctgcctgcttacttgtatatgtaagcatgagggaaatacactgttgctaatactgaaattacaatcaagtaactaaggccttgagttcatatgtgacactgaatgcactagcttccttcgttctataactaatgtaccttaacttcccccattcttatatttacaagaagctaagtcattatgttctgagtgtgtggtatgttcccttaaaaaaaaatgacacttggaagaaaaatgtatgaaattcagaaattccgatcaaagaaaagtaattctttctttttttttttgagacagagtcttgctttgttgcccaggctggagggcagtggtgtgatctcacctcactgcagcttccgcctcctgggttcaagtgattctcatggctcagccgcctgagtagctgggattacaggtgtgagccaacaagcccggctaatttttgtatttttagtagagacaaggtttcaccatgttggtcaggctgggctcaaactcctgaatccgcctgcctcggcctcccaaagtgctgggattacaggtgtgagctgccgcacccagccaagaaaaataatactcttaaatacttagatgttcacctaaagttgatattatttggtatgggaattacttttgaactgtaatctttcagattacaccactttgaaaacaagttttaacagtagggtaaaaatatagtttttgagggtattcccaacttgtgatcttctaccactttagagacattcaagtaatagttttcttagagctttgcacattcctattcactgagattttaaaaatttcacctttattcgagggaaggatcaatgcttattaccatttggaaaaacgaagatcagaaggtaaatgatctttattttctagctttaaagggaaattaaaccattcatgaataaactttaaaaatgtgaagtgtccttttccttttcacaatacaaaaaaaatttcaacagattgtgtggtttgtgcatttatatcctgttaagcattaatagctaatcactgggacttgaattctgatggcagatagtctcttgcttagtgagatggagttaactattttttagtaggaagtgagaacagctgattttcatgccacgtttcatagccccacttttggtagactaccaccacgcttcttcgcgtaagcagtggcatcttgggaatgaatgcccagccgctcgtgggttggtgcaaagaagtataaacatatatcactaaggaaaaagaaagtttgtcttgcccttctgacacagtgtgtgcacttcaggcaatttttggaaaatataaaaaattccaaattctgcctttcagcagcatcaattgctaggaacatttcattcatttccctgtaatattaatgttctttaagcataatcactaattataagttgtatcctatttttttccagcttaatttctgtggtttattgaaaaccaagtataaatgtgactaaaagcattttgctttgtttttatagttaactttcttaaggttatggacattttataatgtaacatttgattggcctggcctcttgacaattcccttctagttatgcatatcctcctgttgccacatttcttgttttaaaactcagtttcttgttttccagttgttgctatgtataacacccatcttgaaagagagtatataggaagttattcagataacttttgtagtagtgatattcaactatagcagtaccttaactcatgatgagcttaggaacataaaagataattgttgcttgaatagcacccccagagatactgacctaattggtctggggtggagatctggcatggtagtttttttcaagctccaatcatcggccagacagttgctttatgtaggtttttaaatgccaaaggcagatatgaagtagatttaattaagacttgacttcagcaatacaggggaacttaaaatacttatttttctttaaactgcaggagtcactgttaggtattgcttaaaaaaaattgcataaaagctttgcttgtcaagttaggattgctggaataccactaaagatttttgacttgtgaataaatgagctgtcatcgcaaaaaggcgatttgagaaatgtgggcttcagtattaattgccattttgctgacacccagtgtacctacctacctgagaaatttattttgtccatcatgtatttctcaaagcaaaaggtggttttcaagtataatgtcgttttcaacatgcttattacttagttttacgtcagctcatttcatcatcattgataacttgtgaaatacttatctccatcctatggaataggggagacgggtttagacaggttcaattagctcaagtctacacagctgaagtagcagagaaagtgggatctagatggtctgatcctagtgatctaccatatgaaggacatagtttgtgtcctggtccaagtcaaatattgactcctcacaaacagtaagtatggcaattttgtgatgcctttgattccactttacatggagtactattatttgtgaaatgtctttaagatttttggtcttaaatttttgaagactgctttccccctttatctcccagaaaattgagaagaagtaaactcctgcccactaacaatctcagtccgtgaacaaaaccaacatgaacattcctaaacaagagtgtgtgttactctaagaagaaggctatagaatttatggaaatggcttatgtaacctacaagactggagaacagaatgtgactggccttttctaatggtcctttaagatttaatgattaaagcaagagttttttataattgactttgtggtctaaattcttgatactgtttataattctacaaagaacaaaaattgttatgtactataggcacttaagaaccctgaggaaaaataatacaatgtgtgtgtgtgagagagagagtgagttactgacattgttccaaaaaaaaaaaaaaaaaaaaaaaaaatgtggagggttgaaatggtaaggaattggaatcttttgtattttcgagcaataagaattcctattcttgtttcaaatagaggtttgttaggaattacagttgtggggagcaaactttcttttttgtgctgttttaattcaaaatgtatatccttaattgtatataatatgtagataaatatatgagggtattaagctactttgaattaaatttaaggatatatttcacatgaaaacaaatacaaacgagaatcaaaataaagttttgcaaagta

SEQ ID NO: 14884 - DNA, 6994 bp, Homo sapiens
agaagctcccggccgggggcgcgcacgtaggcacgcagaggccgtcacgtgggtcgccgaggctcgcaagtgcgcgtggccgtggcggctggtgtggggttgagtcagttgtgggacccggagctgctgacccagcgggtggcccaccgaaccggtgacacagcggcaggcgttagggctcgggagccgcgagcctggcctcgtcctagagctcggccgagccgtcgccgccgtcgtcccccgcccccagtcagcaaaccgccgccgcgggcgcgcccccgctctgcgctgtctctccgatggcgtccgcctcaggggccatggcgaagcacgagcagatcctggtcctcgatccgcccacagacctcaaattcaaaggccccttcacagatgtagtcactacaaatcttaaattgcgaaatccatcggatagaaaagtgtgtttcaaagtgaagactacagcacctcgccggtactgtgtgaggcccaacagtggaattattgacccagggtcaactgtgactgtttcagtaatgctacagccctttgactatgatccgaatgaaaagagtaaacacaagtttatggtacagacaatttttgctccaccaaacacttcagatatggaagctgtgtggaaagaggcaaaacctgatgaattaatggattccaaattgagatgcgtatttgaaatgcccaatgaaaatgataaattgggtataactccaccagggaatgctccgactgtcacttcaatgagcagcatcaacaacacagttgcaacacctgccagttatcacacgaaggatgaccccaggggactcagtgtgttgaaacaggagaaacagaagaatgatatggaacctagcaaagctgttccactgaatgcatctaagcaagatggacctatgccaaaaccacacagtgtttcacttaatgataccgaaacaaggaaactaatggaagagtgtaaaagacttcagggagaaatgatgaagctatcagaagaaaatcggcacctgagagatgaaggtttaaggctcagaaaggtagcacattcggataaacctggatcaacctcaactgcatccttcagagataatgtcaccagtcctcttccttcacttcttgttgtaattgcagccattttcattggattctttctagggaaattcatcttgtagagtgaagcatgcagagtgctgtttctttttttttttttctcttgaccagaaaaagatttgtttacctaccatttcattggtagtatggcccacggtgaccatttttttgtgtgtacagcgtcatataggctttgcctttaatgatctcttacggttagaaaacacaataaaaacaaactgttcggctactggacaggttgtatattaccagatcatcactagcagatgtcagttgcacattgagtcctttatgaaattcataaataaagaattgttctttctttgtggttttaataagagttcaagaattgttcagagtcttgtaaatgttattttaataatccctttaaattttatctgttgctgttacctcttgaaatatgatttatttagattgctaatcccactcattcaggaaatgccaagaggtattccttggggaaatggtgcctcttacagtgtaaatttttcctcctttacctttgctaatatcatggcagaatttttcttatcccttgtgaggcagttgttgactgagtttttcatccttacaatcctgtcccatggtatttaacataaaaaaaaataaaactgttaacagattcttgctcgatagcttgtttgtgtctgtcgtgttattagagggaactccactatatatggtcacttgaaattatgatgcaaaggtttctcttgcattgaaaccctcttggatattacagtatttttaattgaaagtcctaattctgttaaggaaaggagttgattaaattttaaggtaccactggtattttgggagattataatcagtttgttttcaagataatagaaaataaggtccatgagaatagaagttatgtgatttcagtgagttgatgtgtacagcatggctgtgctccatctgatttaccccattcttaagttctgagagtatgttctcaaggaagatttaactctctttggttttaaattactttttaaccagcctaataaataagtcttactacttttcataatatttcataatagttaaaagtaggtgtttttttcgtgctcaatttggcactcaaaataatgttcattatggaagtttggtaatactgagcaagcctgtggaattttctttatgaaaaatgattttagcctttgcaaatgttaaccatgtgaaacacattttcagtataagtatgcgttacagggtttgatactttcctgcacttaggtttgtcctattcttcatttattcatactaggatagaaaattttggaatcagaaaatagatccagtgtttagctacatacaatctagtacaagtgaatttttattcttaaacataggtgtgttggctctttttttaaaagatgcgctctacctgaaaaggaaattggattttagaactggatgtggtgcagtgaagtattttaggcccaggtctgtgtacacattttatagaagaatgaagtactctgaagtattttggttgccttttcatttcaactgtgttttgaatttgtcagatcacacatatattgtgttattgggcgctgtggtatcttttataaaacctcttgcttgtgtgcaaaagttcctaaaaggaaacacaagtaatgcctatccattactagcatgctatgctgcatgctttactgccattgctgtatgctttactgtctttgtaaaaatccccctctccccttttctggtaactggaaaagcatgctaaaaatagtcttatattttcaccccataaatgcagaatcagtaattccttggcttaaagctcttatataatcaatattattggtggtaaataccaagtttggtatctcatagctatctttttttaaagaaattaagttcttgaaaatttagccaaatcccgttttatgggaatgctctttagaattcattttgttcagcccctttgttctatggttgagaaatctgaggccttacgaaggttaagagaactttccccgtgtctcacaggtaggtagaggcagagctggaactagatatctggtctgttgactctagctcagtgtcttctggtaactgttgaaaattgtcttagtttgagagatggctgaaataatgaacataaaatgctatttataataacaagtatatgtgaaatttcttattgtaagactactaccggcttactgttgaatagtttggttatagtgtttaggctagaaatgcctcccacattggtaataaacattacaaaatacaatgtatttttaggtaggcattttataaaatgcattatgccatggttgcttttgagatagattgtagtctgggtagcatctttaaaatgtatgtgggcttaactgttgttcatatcaggagatgctctgattgtataggtgagactctgtttctgttatttttaattgctgtatgaaatgtgatcagattattttactaccaacagttatagtttgaaagtccaactgtattaattgactgataatatgataatatagagattaaattgtttgtcttcattccttatatgtttagaagtttttgctttgtctgcctgcttacttgtatatgtaagcatgagggaaatacactgttgctaatactgaaattacaatcaagtaactaaggccttgagttcatatgtgacactgaatgcactagcttccttcgttctataactaatgtaccttaacttcccccattcttatatttacaagaagctaagtcattatgttctgagtgtgtggtatgttcccttaaaaaaaaatgacacttggaagaaaaatgtatgaaattcagaaattccgatcaaagaaaagtaattctttctttttttttttgagacagagtcttgctttgttgcccaggctggagggcagtggtgtgatctcacctcactgcagcttccgcctcctgggttcaagtgattctcatggctcagccgcctgagtagctgggattacaggtgtgagccaacaagcccggctaatttttgtatttttagtagagacaaggtttcaccatgttggtcaggctgggctcaaactcctgaatccgcctgcctcggcctcccaaagtgctgggattacaggtgtgagctgccgcacccagccaagaaaaataatactcttaaatacttagatgttcacctaaagttgatattatttggtatgggaattacttttgaactgtaatctttcagattacaccactttgaaaacaagttttaacagtagggtaaaaatatagtttttgagggtattcccaacttgtgatcttctaccactttagagacattcaagtaatagttttcttagagctttgcacattcctattcactgagattttaaaaatttcacctttattcgagggaaggatcaatgcttattaccatttggaaaaacgaagatcagaaggtaaatgatctttattttctagctttaaagggaaattaaaccattcatgaataaactttaaaaatgtgaagtgtccttttccttttcacaatacaaaaaaaatttcaacagattgtgtggtttgtgcatttatatcctgttaagcattaatagctaatcactgggacttgaattctgatggcagatagtctcttgcttagtgagatggagttaactattttttagtaggaagtgagaacagctgattttcatgccacgtttcatagccccacttttggtagactaccaccacgcttcttcgcgtaagcagtggcatcttgggaatgaatgcccagccgctcgtgggttggtgcaaagaagtataaacatatatcactaaggaaaaagaaagtttgtcttgcccttctgacacagtgtgtgcacttcaggcaatttttggaaaatataaaaaattccaaattctgcctttcagcagcatcaattgctaggaacatttcattcatttccctgtaatattaatgttctttaagcataatcactaattataagttgtatcctatttttttccagcttaatttctgtggtttattgaaaaccaagtataaatgtgactaaaagcattttgctttgtttttatagttaactttcttaaggttatggacattttataatgtaacatttgattggcctggcctcttgacaattcccttctagttatgcatatcctcctgttgccacatttcttgttttaaaactcagtttcttgttttccagttgttgctatgtataacacccatcttgaaagagagtatataggaagttattcagataacttttgtagtagtgatattcaactatagcagtaccttaactcatgatgagcttaggaacataaaagataattgttgcttgaatagcacccccagagatactgacctaattggtctggggtggagatctggcatggtagtttttttcaagctccaatcatcggccagacagttgctttatgtaggtttttaaatgccaaaggcagatatgaagtagatttaattaagacttgacttcagcaatacaggggaacttaaaatacttatttttctttaaactgcaggagtcactgttaggtattgcttaaaaaaaattgcataaaagctttgcttgtcaagttaggattgctggaataccactaaagatttttgacttgtgaataaatgagctgtcatcgcaaaaaggcgatttgagaaatgtgggcttcagtattaattgccattttgctgacacccagtgtacctacctacctgagaaatttattttgtccatcatgtatttctcaaagcaaaaggtggttttcaagtataatgtcgttttcaacatgcttattacttagttttacgtcagctcatttcatcatcattgataacttgtgaaatacttatctccatcctatggaataggggagacgggtttagacaggttcaattagctcaagtctacacagctgaagtagcagagaaagtgggatctagatggtctgatcctagtgatctaccatatgaaggacatagtttgtgtcctggtccaagtcaaatattgactcctcacaaacagtaagtatggcaattttgtgatgcctttgattccactttacatggagtactattatttgtgaaatgtctttaagatttttggtcttaaatttttgaagactgctttccccctttatctcccagaaaattgagaagaagtaaactcctgcccactaacaatctcagtccgtgaacaaaaccaacatgaacattcctaaacaagagtgtgtgttactctaagaagaaggctatagaatttatggaaatggcttatgtaacctacaagactggagaacagaatgtgactggccttttctaatggtcctttaagatttaatgattaaagcaagagttttttataattgactttgtggtctaaattcttgatactgtttataattctacaaagaacaaaaattgttatgtactataggcacttaagaaccctgaggaaaaataatacaatgtgtgtgtgtgagagagagagtgagttactgacattgttccaaaaaaaaaaaaaaaaaaaaaaaaaatgtggagggttgaaatggtaaggaattggaatcttttgtattttcgagcaataagaattcctattcttgtttcaaatagaggtttgttaggaattacagttgtggggagcaaactttcttttttgtgctgttttaattcaaaatgtatatccttaattgtatataatatgtagataaatatatgagggtattaagctactttgaattaaatttaaggatatatttcacatgaaaacaaatacaaacgagaatcaaaataaagttttgcaaagta

SEQ ID NO: 14885 - DNA, 1343 bp, Homo sapiens
ccggcccggaagtgcgcaggcgctggcaagatggcgggaggggtgctcccgctgaggggcctccgcgccttgtgtcgcgtgctgctcttcctctcgcagttctgcattctgtcgggcggtgaaagtactgaaatcccaccttatgtgatgaagtgtccgagcaatggtttgtgtagcaggcttcctgcagactgtatagactgcacaacaaatttctcctgtacctatgggaagcctgtcacttttgactgtgcagtgaaaccatctgttacctgtgttgatcaagacttcaaatcccaaaagaacttcatcattaacatgacttgcagattttgctggcagcttcctgaaacagattacgagtgtaccaactccaccagctgcatgacggtgtcctgtcctcggcagcgctaccctgccaactgcacggtgcgggaccacgtccactgcttgggtaaccgtacttttcccaaaatgctatattgcaattggactggaggctataagtggtctacggctctggctctaagcatcaccctcggtgggtttggagcagaccgtttctacctgggccagtggcgggaaggcctcggcaagctcttcagcttcggtggcctgggaatatggacgctgatagacgtcctgctcattggagttggctatgttggaccagcagatggctctttgtacatttagctgtggtgtgtgcttcagaaaggagcagggcttagaaaaagcccttttgtccgtaggagttgatgtggtgtgagtgatatatttctatgtttttaatgtacagcatctgtactttgtttgccttgataaaggtaagataaatgaaacgctgaactatgctaatctggaatttgtttttatttgcctgaaatatatttttttctgtgaaaaaattaaaacgtacttaagccaggagaatgaattatacagtgattgaaaatccatttaattcctatgacttttgttttgtattgcccaagtcaaactacatcacttgtatctccagcccaaatgtagtctgccttgaaaagtctttcagctgtgactgcaggaagtgggagtgtttttattgttagctaattgctgtgactgcaggaagtgggagtgtttctgttgttggctaattgaagttattaggctcagcttcagtcatgtgtaagttttgcagtgtaatacatatgtagtctggtctgtatatatgaaaatttgaattaaactgcagaatgtttatgtctagttatggtttaaattttcttagtagtatataaaaggtaagagtactgaaaaattaataaaattgcaagttaagaaataaaaaaaaaaaaaaa

SEQ ID NO: 14886 - DNA, 1421 bp, Homo sapiens
ccggcccggaagtgcgcaggcgctggcaagatggcgggaggggtgctcccgctgaggggcctccgcgccttgtgtcgcgtgctgctcttcctctcgcagttctgcattctgtcgggcggtgagcaatcgcaggcgctggctcagtcaataaaggatccgggcccaacacgcacattcacagtagttcccagggcagcagaaagtactgaaatcccaccttatgtgatgaagtgtccgagcaatggtttgtgtagcaggcttcctgcagactgtatagactgcacaacaaatttctcctgtacctatgggaagcctgtcacttttgactgtgcagtgaaaccatctgttacctgtgttgatcaagacttcaaatcccaaaagaacttcatcattaacatgacttgcagattttgctggcagcttcctgaaacagattacgagtgtaccaactccaccagctgcatgacggtgtcctgtcctcggcagcgctaccctgccaactgcacggtgcgggaccacgtccactgcttgggtaaccgtacttttcccaaaatgctatattgcaattggactggaggctataagtggtctacggctctggctctaagcatcaccctcggtgggtttggagcagaccgtttctacctgggccagtggcgggaaggcctcggcaagctcttcagcttcggtggcctgggaatatggacgctgatagacgtcctgctcattggagttggctatgttggaccagcagatggctctttgtacatttagctgtggtgtgtgcttcagaaaggagcagggcttagaaaaagcccttttgtccgtaggagttgatgtggtgtgagtgatatatttctatgtttttaatgtacagcatctgtactttgtttgccttgataaaggtaagataaatgaaacgctgaactatgctaatctggaatttgtttttatttgcctgaaatatatttttttctgtgaaaaaattaaaacgtacttaagccaggagaatgaattatacagtgattgaaaatccatttaattcctatgacttttgttttgtattgcccaagtcaaactacatcacttgtatctccagcccaaatgtagtctgccttgaaaagtctttcagctgtgactgcaggaagtgggagtgtttttattgttagctaattgctgtgactgcaggaagtgggagtgtttctgttgttggctaattgaagttattaggctcagcttcagtcatgtgtaagttttgcagtgtaatacatatgtagtctggtctgtatatatgaaaatttgaattaaactgcagaatgtttatgtctagttatggtttaaattttcttagtagtatataaaaggtaagagtactgaaaaattaataaaattgcaagttaagaaataaaaaaaaaaaaaaa

SEQ ID NO: 14887 - DNA, 8011 bp, Homo sapiens
cgcccctcgggggcggctgtggcggaggaacgatggccgacggcggcggccctaaggaggcgccaagcctgcggagctctcccgggccggcgccgcgggtcccgcgcgcggtcgggccgagtggcggtggcggggagaccccgcggaccgcggcgctggcgctgcgcttcgacaagcccattaagcaggccttctacaacaccggggccgtgctgttcgtgtgcctgtgctgcggcgccgcggtgctggtctacttcatcctggaggccttcctgcggccgctgctctgggccgtgctgtgcggcacttttctgcaccccttcaagagctcgctgacgcgcctgggccgccactggctgcagcgcctgcaccgcgcgcacacgcccatcgtcctggccgcgctgctcctgccgctctgcttcgtcgactacggcgtcgaggccctgggcgagcaggcgctgcgccgccgccgcctgctcctgctgctcggcgccggcggcccgctcctgtacggcctctactgcctcggcagctacttgggcgtgcaggtgctgctggtgcacgctgccacgctcatctgccgcgggctggactacttcagcagcctgtggatctggacgttggtggttggctatgtgttgactgtttcattcaagtggaatgcaagcactgaacgctacttgagagcagtttcaattcctgtctggattatattgctttttcatttagcatccctggctggctcatggagaattccagtattcctggttattgttttcctgatgtctgtgggtaccctctatgaaaaacagaatggaaaagagtcttctggggcagagttaccagggcaggttatctccatggcagcttctactctggcaaacttggccatctctatcacagggtatgaatcaagcagtgaagaccagccctccactcagcctgcagaagcagtggacaggggagaatccgctccaacgttgtccacctccccttcaccctcctccccttcacccacttccccttcacctactctgggcagacgaaggcctgaaataggaacgtttcttagaaagaagaaaactagtgacatctactttgtgtctctagtttgggccattgtcgtcatgcagatctggttgaacctgtggattgtgcagttgctgccagtgccgattgcagtctggatactcaaaaagcttgtcattcactttggagttgtggatttcctagagaaacgctaccatgtgtggtggggcattatagaaagcttcctgaaggagcggcagggagctctcgcgccttggcccattgtcgggcttggaaaattcttgttaaaagttgatagcaagctctggcactggctaaataagaagatgatcatctggttggagaagatgttagataaaataattagcattttcatcatatttttgttagtgataggaactcttcttttagccctactcctgactgcaaaggtacatcaagagagtgtacacatgattgaagtcacaagtaatttgattaatgaaactctagcaaatcaccctgagtgggcaaattggcttcctgaggctcaggtagtccaaagagccctgaattctgcggctaacaacgtgtatcagtatggacgagaatggataactcacaagctccataaaattctaggagataaggtgaacaatactgctgtaattgaaaagcaagtactagaactttgggacagactgtatcactcttggtttgtaaagaatgtaacacactctggaaggcacaaaggacagaagttgcatgtcagtcgtcagaatagctggctgggagacattctggactggcaggatattgtttcctttgttcacgagaacattgagacatttctttcgatcttggagtctctgtggatcgttatgagccggaatgtgagcctgctgttcaccactgtcactacactcttgaccatcctcttctacagcgggacagcccttctcaattttgtactctctctgataattttcctgaccacactattttatctattaagttccagtgatgagtactacaagccagtgaagtgggtgataagcctgactccactatctcagccaggtccttcttctaatattattggccagtctgtggaagaagctatcagaggggtgtttgatgcttccctcaaaatggctggcttctatggattgtatacctggctgactcatactatgtttggcatcaatattgtcttcataccatcagcattagcagcaatccttggagcagtgccattcctggggacatactgggcagcagtacctgcagttcttgacctgtggctgacacaagggttaggatgcaaggccattttactgttgatttttcatctcttgccaacatactttgtagatactgcaatctactctgacatatcaggaggtggccatccttacctgacaggcttggcagtggccggtggagcatactacctaggcctggaaggagcaatcatcggtcctattcttctctgcatacttgtggttgcttccaatatctatagtgccatgctagtgagtcccacgaattcagttcccacgccaaaccagaccccatggcctgctcagcctcagcggactttccgtgacatttctgaaagatctgaaatcttcagtaaggttgatgtggtttcctctgcagtgatttttctaaggaagttcaaatttgacagcgagttcagctcagctgtggccttctgcccttccagctgtgcctagcaagcaaaacccaggaaagaagcagaagcctcctggccttacatacagaatgcctggacaagagagaacttgctgcgggctgctttgtattttaaaacacagcttgagagttcagcgttggtggtttgctcacttaactgttgttaagatggcttgaaaagtttcattttatacactggtaccctggcttgaaatttttccactttggttatctatgttactatattatatatttataaagttattttaagaactctaaactacctgctgttaaaagaatagatggtgtaattttttcctggtttaagaaatgtattgttaaacttttctaagacagtcacttttcaaggaagagggctttcacttttgagtgtgtagttgagtgagcaggaaaaatgaatcttctacccttctcccacaatgtattatacgctctttaagaaataataaatcataagtataagggtggggtggcttatttgatgttcagttttatattataaccctgggagatacaaagactgaagctcttcctcctcttccttttctcttcacgcttctttacactattgccaaattattaaaacttgggctgaccacgttggaagtgaaatacttattaagctgctatgaatggtaacagtatgataaaattcatgctgttattaggttttctccttccaggtggttgaagtgaaaaatctcaggtgtagcaatactctgatttgttaaatgtatccgtttcattatttggaactctgccaataagttagttttcagcagaattttgtatttatgtagtattttcccatctcttagcacagtgccttgcacatgactctaaatgaatcttgttgaattgaattgcaactttaaaaatatctcagatatcacaataaccagcatagtgctttacattttacaaagtccttttgcacatactatttcacaagtacatcacatcagctttcatatagctttatattattttacatcagttttacactgatggagaagctaaggttcagaaaagtgaccaactcaaagtcgtaaagtgtagtaggatttggcctcagatctttgactccgttgtgtgcagattctgctgtattagtgttccttctaaatattgtatgcagttttcccagtgttacgagattggtgttgctatccatttgttgtgaatgaagacttgtcctatagtacatacagggctgagagtggactgtagttcttagctgaaccctttctactgtttaaaacaatcatcaggcctatcctctgctcccaggggaatgtgggagagaaaagggttcttggccaggctgtaggtggtggctcacatctgtaatcccagcactttggaaggctgaggtgggtggattgcttgagcccagggatttgagatcagcctaggcaacatggcaaaaccccatctcgacaaaaaaaaaaaaaaaaaaaaaaaaattagctgggcacggtggtgtggctatagtctgagctactcaggaggctgatgtatgaggatcacctgagtccaggaggtcgaggctgcagtgagccaagatggcgccactgcactccagcctgggtgagagagtgagacactgtcccaaggaaaaaaaaaaagtgttggggggtagttcttaagcgttgaagatttcctttttggaaagtatttaaaggtagaaatattaataatttttcctaaaacatctccctaagaagtcactgataattataattagtttaaatttattcttacactacttaagaaaaatttcatttagaaaaggctaccatgagatcttttgactatatggagtagactgcatacagatctctttatttctattatgaatattttagcgattataatcagctattccactgagtattagatttggtcactaagtaactcatgtttttctttagtcaatcattcattcattcactaaaacatttgttgagagttggctaaactctagattctgtgccaggcactgtacagggtgatggagatcactcataagaaggcctcttgctcttagccagatcatatgtaatactaaatttaaattttttgcattaaaaggctaaaaaatcatttgtttttgttaattatatactggttgatttatagatgtaattagcacatattcataagagacaaatatatacaatgagttactatacatatacaaagtgattttagctgtataaagtgatattgcaaaaaactacagctaatgtttcttgctgggtaattattagcataaatatcaggttcttagaggtctttaagagaatactttagagctaccaaaattagcagcagtgatgtaatatcaccctgaaataccaggagcagaggtgccccagagtgcttcacagctatgatcaggaaacttgacctgccccattgctacagcaacggcataaggactaggaaggtccactagctggggaggtcttggaaccctccgagccagaaagaagcattccagcatgattcctcagatgcaatgaggaaggtttacagaattttcacagggcaacagagatcaagtggtatgaaaaggtaggagttttaagctcaagtctcaaagataacctacctttacattctcagtcagaatttgacccagaaagaggaagtttcttcaggaacagaccgtacgttgatgaagtagaagtcatttcagtaaaaacggagtacagaacttggtcataatatcttgcattttatagatttattaaagattagtttcaagttcacattcgctattcagttgtaaaccgaatggatgggaggggagaaaatacaagctctccacacaggtatgctcctctcttttctgagagagaaggcatgggattttcagcataaattccatgttatgtgagtgctgtttgagttctgaagttcctatcaatatctgttcctgcaagtgatctctgtaagaccaccttacatgctggtcttagttattgttaaaattgcaaggtttcttcacaccctctttgataagaagtgtttagctggcagagctttcccttgacttctgagtctagtgtgggttggcccatgacagtgggaagaaatccaacatgttacatggagaccttgtatgtaaacaaactctgtagcctttgaaagtggaactgctttttacagttaaagggctgctaaatcgcttgcagatgagatcttctggctcaccttgatcttcacatgaacccattgtgacctatctggatttcctaggacctgtagtttccatttgggttatattagtgcctcaggaatgtgtcactactggtcaagcaatactcagaaattcaggctgtgaggggttagattagaggaaagtaatttaggtgagctatccagagctttcaacctcagggtttataggaaaaaaaaaacaaaatacaaaaacccttaggacttctcatactctagccctgaccttgcagtctcctctgaggggcctcctaagacccttaaaataatattacaataggactttgagtgtgcatttcacagtggaaatagcctctggctagcattacttccaaatgctagttccagctaaaaacaagtactttttattagtttcttgtctttcaacattctgccatcaaaatatattcattttattaacttaccgattattgggaactgcaaaaaaaaaaaaaaaaaaacacacatgctgtctgcagccactgtttggttatttttgatagtttaagagaattataaatcaagttgttctgtctactagagtcagaaattctgtgctagaatgggacttctaaaattaggtggtcctgtcactttctagagaaagacccaaattcataggtttaagtggcttgtctgacatacacatacagccagttagtaacagaattcagaatagaatagagttcttttttttctgcagtccgttgttctacttctctttccttttcttcatggttgagcagcttttggcaaaatgtgttccatatagcagtagttccaagagatgttaatagatgtaagaaaaaaagtgtgtgtgtgttgggggtgggggattgcatggtcaattaaaatgaaggaatgctgagtttgtttccttactgtaggacttctaagagttttgaacatgctattacacattgtgaatttataaaaggggacaaacactgtttgaccttagactgcactccccttctttattcctcagagcatctcaaaggactacagggtcctttgagaaacatggcccttgatcaagtttacaactctttgagaagacatccctaatggaaatactgaatggcagatctattactgtggtaccatgtagtgtgtaataaatcttgaagtccagaaagcaagtatatttgctgtttagagctatacttaaggtatagagattcttttccacctgtggtgtgtaaaatcagtattgtgtttaattttgcaggtttttcaaggatcaactaatgtgcaaatacagtggtgatatattgatattacattttaataatgcttttgtatggcactttatagttttcagacaccttttgtaacagccctgtgagacagacaatattatccttattgtacagatgggggggctctggaggctctgaaaagtttttggtgatattcccctaagtttataccacaaaatgatggagccagaatttagttgcagaacttctgactccaagtccagagttctttactagacatctggtttcttactagctttttgctagctttttattttacagtgaaaagtatggaagcaaatcctgataattttggcttattatcaaatatcatttattttttattgcagagacccagcagatgtaactctcattgtagccatcccaaagaaaacccttctttgccctttgcagtgccacttatttaggtaactgaagtgtatttccagtacaatttgattttgaactaagatttgatatagagttgtaattgcttacataactctttgaaaatgtatcatccctgggttctcaggtgaaagaggcaattcaaaagtaaaaaagaatattcgaatacaataaataccctctgttctcacacaaatgctgtttcttagctaacttgctttgacaacctactgatgtaacttctttattaatgtgaaatatttatattttgaaataaaattactagtgttgaatgaatcatgtggtaaaaaaaaaaaaaaaaaaaa

SEQ ID NO: 14888 - DNA, 1929 bp, Homo sapiens
agcccgaactgaggcggcggcgggagcccggttggcgtctggtcttcgcgtcggccccgcggagccagacgctgcccccggcgcggggagaagatggtgccgagcggcctcgggcccgccacgcgccgccacgagtgagcccagcgcgaccgcgggcgtccgccgagcagctggcccggctgggcccggggcgcgcagctgcccgccggggcggggtggagctgatcagaataatgttcagcatcaaccccctggagaacctgaaggtgtacatcagcagtcggcctcccctggtggtcttcatgatcagcgtaagcgccatggccatagctttcctgaccctgggctacttcttcaaaatcaaggagattaaatccccagaaatggcagaggattggaatacttttctgctacggttcaatgatttggacttgtgtgtatcagagaatgaaaccctcaagcatctcacaaacgacaccacaactccggaaagtacaatgaccagcgggcaggcccgagcttccacccagtccccccaggccctggaggactcgggcccggtgaatatctcagtctcaatcaccctaaccctggacccactgaaacccttcggagggtattcccgcaacgtcacccatctgtactcaaccatcttagggcatcagattggactttcaggcagggaagcccacgaggagataaacatcaccttcaccctgcctacagcgtggagctcagatgactgcgccctccacggtcactgtgagcaggtggtattcacagcctgcatgaccctcacggccagccctggggtgttccccgtcactgtacagccaccgcactgtgttcctgacacgtacagcaacgccacgctctggtacaagatcttcacaactgccagagatgccaacacaaaatacgcccaagattacaatcctttctggtgttataagggggccattggaaaagtctatcatgctttaaatcccaagcttacagtgattgttccagatgatgaccgttcattaataaatttgcatctcatgcacaccagttacttcctctttgtgatggtgataacaatgttttgctatgctgttatcaagggcagacctagcaaattgcgtcagagcaatcctgaattttgtcccgagaaggtggctttggctgaagcctaattccacagctccttgttttttgagagagactgagagaaccataatccttgcctgctgaacccagcctgggcctggatgctctgtgaatacattatcttgcgatgttgggttattccagccaaagacatttcaagtgcctgtaactgatttgtacatatttataaaaatctattcagaaattggtccaataatgcacgtgctttgccctgggtacagccagagcccttcaaccccaccttggacttgaggacctacctgatgggacgtttccacgtgtctctagagaaggattcctggatctagctggtcacgacgatgttttcaccaaggtcacaggagcattgcgtcgctgatggggttgaagtttggtttggttcttgtttcagcccaatatgtagagaacatttgaaacagtctgcacctttgatacggtattgcatttccaaagccaccaatccattttgtggattttatgtgtctgtggcttaataatcatagtaacaacaataatacctttttctccattttgcttgcaggaaacataccttaagttttttttgttttgtttttgtttttttgttttttgttttcctttatgaagaaaaaataaaatagtcacattttaatactaaaaaaaaaaaaaaaaaaaaaaaaaaaaaacccacgcgtccgcccacgcgtccgcggacgcgtgggcggacgcacgcgtccgaaaaaaaaaaaaaaaaaaaaaaaaaaaaaaaaaaaaaaa

SEQ ID NO: 14889 - DNA, 1795 bp, Homo sapiens
gggtgagtgcaccgcgttctcgcacgcgtcatggcggtcctcggagtacagctggtggtgaccctgctcactgccaccctcatgcacaggctggcgccacactgctccttcgcgcgctggctgctctgtaacggcagtttgttccgatacaagcacccgtctgaggaggagcttcgggccctggcggggaagccgaggcccagaggcaggaaagagcggtgggccaatggccttagtgaggagaagccactgtctgtgccccgagatgccccgttccagctggagacctgccccctcacgaccgtggatgccctggtcctgcgcttcttcctggagtaccagtggtttgtggactttgctgtgtactcgggcggcgtgtacctcttcacagaggcctactactacatgctgggaccagccaaggagactaacattgctgtgttctggtgcctgctcacagtgaccttctccatcaagatgttcctgacagtgacacggctgtacttcagcgccgaggaggggggtgagcgctctgtctgcctcacctttgccttcctcttcctgctgctggccatgctggtgcaagtggtgcgggaggagaccctcgagctgggcctggagcctggtctggccagcatgacccagaacttagagccacttctgaagaagcagggctgggactgggcgcttcctgtggccaagctggctatccgcgtgggactggcagtggtgggctctgtgctgggtgccttcctcaccttcccaggcctgcggctggcccagacccaccgggacgcactgaccatgtcggaggacagacccatgctgcagttcctcctgcacaccagcttcctgtctcccctgttcatcctgtggctctggacaaagcccattgcacgggacttcctgcaccagccgccgtttggggagacgcgtttctccctgctgtccgattctgccttcgactctgggcgcctctggttgctggtggtgctgtgcctgctgcggctggcggtgacccggccccacctgcaggcctacctgtgcctggccaaggcccgggtggagcagctgcgaagggaggctggccgcatcgaagcccgtgaaatccagcagagggtggtccgagtctactgctatgtgaccgtggtgagcttgcagtacctgacgccgctcatcctcaccctcaactgcacacttctgctcaagacgctgggaggctattcctggggcctgggcccagctcctctactatcccccgacccatcctcagccagcgctgcccccatcggctctggggaggacgaagtccagcagactgcagcgcggattgccggggccctgggtggcctgcttactcccctcttcctccgtggcgtcctggcctacctcatctggtggacggctgcctgccagctgctcgccagccttttcggcctctacttccaccagcacttggcaggctcctagctgcctgcagaccctccaggggccctgaggtctgttcctggggcagcgggacactagcctgccccctctgtttgcgcccccgtgtccccagctgcaaggtggggccggactccccggcgttcccttcaccacagtgcctgacccgcggccccccttggacgccgagtttctgcctcagaactgtctctcctgggcccagcagcatgagggtcccgaggccattgtctccgaagcgtatgtgccaggtttgagtggcgagggtgatgctggctgctcttctgaacaaataaaggagcatgccgatttttaaaaaaaaaaaaaaaaa

SEQ ID NO: 14890 - DNA, 5061 bp, Homo sapiens
gacagacatggcgcttcagctgtcttcagaataatgtcacccggcctcctctcctgtcttctgcagtcttaaaagacctagtccctaactgaggtctggcttttcctcagccctggatgaagtggagaagacctatttggagactgcttcctgtcaccataaaatcctgaacatttgtcttgaacatgaacactccaaaagaagaattccaggactggcccatagtcagaatagcagctcatttaccagacctcattgtctatggacatttctccccagagcgaccctttatggattattttgacggagtcctgatgtttgttgatatttcaggttttactgcaatgactgagaagttcagcagtgccatgtacatggacagaggggctgagcagttggtggagatcctcaactaccacataagtgcaatagtggagaaagtgttgatttttggaggagacatcctgaaatttgcaggtgatgcactgctagccctgtggagggtggagcgaaagcagctgaaaaacattatcacagtggtaattaaatgtagcctggagatccatggattgtttgagacccaggagtgggaagaaggcctagacatccgagtcaagataggactggctgctggccacatcagcatgttggtctttggagatgaaacacacagccactttctggtgattggtcaggcagtggacgatgtgcgccttgcccagaacatggctcagatgaatgatgttattctgtcaccaaactgctggcagctctgtgaccggagcatgattgaaattgagagtgttccagatcagagagcagttaaggttaacttcttaaaaccaccccccaattttaattttgatgaatttttcacaaagtgtacgaccttcatgcattattatccttctggtgagcacaaaaacctcctgaggcttgcatgcacgctgaagcctgatcctgaactggagatgtccctacaaaagtatgtgatggaaagcattttgaagcagattgataacaaacagcttcagggctatttatctgagcttcgcccagtgacgattgtgtttgtgaacctgatgtttgaagaccaagacaaagcagaagagataggcccagccatccaggatgcctatatgcacatcacttctgtcctgaagatcttccaaggccaaatcaataaagtcttcatgtttgacaagggctgctctttcctctgtgtctttggcttccctggggaaaaggtacctgacgagctcactcatgctctggaatgtgctatggatatatttgacttctgctctcaagtccacaaaatccaaactgtatccatcggtgttgccagtgggattgtcttctgtgggatcgttggacacactgtgagacacgagtacacagtcattggtcaaaaagtcaacttagctgccaggatgatgatgtactacccaggaattgtgacctgcgactctgtcacctacaatgggagcaacctaccagcgtacttttttaaagagcttccaaagaaagttatgaaaggtgttgcagattctggaccattgtatcagtattggggccgtactgagaaagtcatgtttggtatggcgtgcctcatctgcaacagaaaggaggattaccctttgctgggacgtaataaagagatcaactacttcatgtatactatgaagaaatttttgatatctaacagcagccaagtcttaatgtatgagggattaccaggatatggaaaaagccagatacttatgaaaattgagtacctggcccaaggtaagaatcacaggattattgccatttcattgaataagatcagcttccatcaaactttctataccatccagatgttcatggccaatgtcctaggcctagacacttgtaaacattataaagaacgacagaccaaccttcgaaataaagtcatgacactgttggatgaaaagttctactgtcttcttaatgacattttccatgttcagttccctatttctcgggagatttccaggatgagcaccttgaaaaagcaaaaacaattggaaatattgtttatgaagatcttgaagctgatagtgaaagaggaaaggattatttttatcattgatgaggcccagtttgtggattcgacctcctggagatttatggagaagcttatccggactcttcctatcttcatcattatgtccctgtgtcccttcgttaacattccctgtgcagctgccagggccgtaataaagaacaggaacaccacctacattgtcgttggtgcagtacagcctaacgacatctccaacaagatctgtcttgacctcaatgtgagctgcatctccaaagaactggactcgtacctgggggagggaagctgtgggattccattttactgtgaagaattgcttaaaaacctggaacatcatgaggtactcgttttccaacaaacggagtctgaggaaaagacaaataggacctggaataacctgttcaagtattccattaagctaacagagaagttaaacatggttactctccatagtgataaggaaagtgaagaagtctgtcacctcacaagtggtgtcagactgaaaaacctgtcacctccaacgtcattaaaagaaatctctctgatccagctggatagcatgagactttcccaccaaatgctggtgagatgtgctgccatcattggcctgaccttcaccactgagttgttgtttgagattctcccctgttggaatatgaagatgatgatcaagaccctggcaaccctagtggaatctaacattttttattgtttccggaatggcaaggagcttcaaaaggccctgaaacagaatgatccctcatttgaggtgcactatcgttccttgtctctgaagcccagtgaagggatggatcacggtgaagaggaacagcttcgtgaactggagaatgaggtgatcgagtgccacaggattcgattctgtaaccctatgatgcagaaaacagcctacgagctgtggctcaaggaccagagaaaagccatgcacttgaaatgtgcccgctttttagaagaagatgcccacagatgtgaccactgccgaggcagggacttcattccctatcatcacttcacagtgaatattcggctcaacgctttagacatggatgccattaaaaagatggctatgtctcatggatttaaaactgaagaaaagcttatcttgtccaactcagagattcctgagacatctgcattttttcctgaaaatcgcagtcctgaagaaataagagaaaagatcttgaatttctttgaccacgttttaacaaaaatgaagacatctgacgaagacattatccctctggaatcttgccagtgtgaagaaatcctagagattgtcatcttgcctctggcccaccattttctggctttgggagaaaatgacaaagccttatattacttcttagaaattgcatctgcttatctcatcttttgtgataactacatggcatacatgtatttgaatgaaggacagaagttgctaaaaactctcaagaaggacaaatcttggagccagacatttgagtctgccaccttttacagcctcaaaggtgaggtctgtttcaatatgggccagatagtgcttgccaagaaaatgctgaggaaggcactgaagctcctcaaccgaatctttccttacaacttaatctccttgtttctccatatccatgtcgagaaaaacagacactttcattatgtgaatcggcaggcccaagagagcccacctccagggaagaagaggctggcacaactttaccggcaaactgtctgcctttccttgctgtggcgcatctatagctacagttatctttttcactgcaagtattatgcccacctggcagttatgatgcaaatgaatactgcactggaaactcaaaattgtttccagatcattaaggcttacctagactattcgctataccaccacctggctggctacaaaggtgtgtggttcaaatatgaagtcatggccatggagcacatcttcaacctccccctgaaaggcgagggcattgaaatcgtggcatacgtggctgagacactggtcttcaacaagctcataatgggacacctggatttggccattgagttaggctcccgagcccttcagatgtgggcactgctccagaatcccaaccgacattatcagtccctctgcagacttagcagatgtctccttctgaacagcagatacccgcaattgatccaggtgctggggcggctgtgggagctttctgtaacacaggaacacatcttcagcaaggcatttttctattttgtctgcttggacatcctgctttattctggttttgtttatagaacatttgaagaatgtttggaattcatacaccaatacgaaaacaacagaatcctcaagttccacagtggactcctcctgggactttattcctctgtagctatctggtatgccagacttcaggaatgggacaacttttacaaattttccaatagagctaaaaatcttttgccaagaagaaccatgacacttacttactatgacggaatatctaggtacatggaggggcaagttcttcaccttcaaaaacaaatcaaagaacagtcagagaatgcccaagccagtggggaggagctactcaagaacttggagaatctggtggctcaaaataccactggccctgtcttttgcccaaggctctaccacctgatggcttacgtctgtatattaatgggagatgggcagaaatgtggcctcttcctgaacacagccttgcggctctctgaaacacaggggaatatactggagaaatgctggctgaacatgaacaaagaatcatggtactcaacctctgagttaaaagaagaccaatggcttcagacgatcttgagtctcccatcatgggaaaaaattgtagcaggcagggtaaacattcaggatcttcaaaaaaacaaattcctgatgagagctaataccgtggacaatcatttctaacatgtcaaagaaaaaagattttaataagcactaaaaaaaaaaa

SEQ ID NO: 14891 - DNA, 2762 bp, Homo sapiens
gtggggtcgtatcccgcgggtggaggccggggtggcgccggccggggcgggggagcccaaaagaccggctgccgcctgctccccggaaaagggcactcgtctccgtgggtgtggcggagcgcgcggtgcatggaatgggctatgtgaatgaaaaaaggtatccgttatgaaacttccagaaaaacgagctacatttttcagcagccgcagcacggtccttggcaaacaaggatgagaaaaatatccaaccacgggagcctgcgggtggcgaaggtggcataccccctggggctgtgtgtgggcgtgttcatctatgttgcctacatcaagtggcaccgggccaccgccacccaggccttcttcagcatcaccagggcagccccgggggcccggtggggtcagcaggcccacagccccctggggacagctgcagacgggcacgaggtcttctacgggatcatgtttgatgcaggaagcactggcacccgagtacacgtcttccagttcacccggccccccagagaaactcccacgttaacccacgaaaccttcaaagcagtgaagccaggtctttctgcctatgctgatgatgttgaaaagagcgctcagggaatccgggaactactggatgttgctaaacaggacattccgttcgacttctggaaggccacccctctggtcctcaaggccacagctggcttacgcctgttacctggagaaaaggcccagaagttactgcagaaggtgaaagaagtatttaaagcatcgcctttccttgtaggggatgactgtgtttccatcatgaacggaacagatgaaggcgtttcggcgtggatcaccatcaacttcctgacaggcagcttgaaaactccaggagggagcagcgtgggcatgctggacttgggcggaggatccactcagatcgccttcctgccacgcgtggagggcaccctgcaggcctccccacccggctacctgacggcactgcggatgtttaacaggacctacaagctctattcctacagctacctcgggctcgggctgatgtcggcacgcctggcgatcctgggcggcgtggaggggcagcctgctaaggatggaaaggagttggtcagcccttgcttgtctcccagtttcaaaggagagtgggaacacgcagaagtcacgtacagggtttcagggcagaaagcagcggcaagcctgcacgagctgtgtgctgccagagtgtcagaggtccttcaaaacagagtgcacaggacggaggaagtgaagcatgtggacttctatgctttctcctactattacgaccttgcagctggtgtgggcctcatagatgcggagaagggaggcagcctggtggtgggggacttcgagatcgcagccaagtacgtgtgtcggaccctggagacacagccgcagagcagccccttctcatgcatggacctcacctacgtcagcctgctactccaggagttcggctttcccaggagcaaagtgctgaagctcactcggaaaattgacaatgttgagaccagctgggctctgggggccatttttcattacatcgactccctgaacagacagaagagtccagcctcatagtggccgagccatccctgtccccgtcagcagtgtctgtgtgtctgcataaaccctcctgtcctggacgtgacttcatcctgaggagccacagcacaggccgtgctggcactttctgcacactggctctgggacttgcagaaggcctggtgctgccctggcatcagcctcttccagtcacatctggccagagggctgtctggacctgggccctgctcaatgccacctgtctgcctgggctccaagtgggcaggaccaggacagaaccacaggcacacactgagggggcagtgtggctccctgcctgtcccatccccatgccccgtccgcggggctgtggctgctgctgtgcatgtccctgcgatgggagtcttgtctcccagcctgtcagtttcctccccagggcagagctccccttcctgcaagagtctgggaggcggtgcaggctgtcctggctgctctggggaagccgagggacagccataacacccccgggacagtaggtctgggcggcaccactgggaactctggacttgagtgtgtttgctcttccttgggtatgaatgtgtgagttcacccagaggcctgctctcctcacacattgtgtggtttggggttaatgatggagggagacacctcttcatagacggcaggtgcccacctttcagggagtctcccagcatgggcggatgccgggcatgagctgctgtaaactatttgtggctgtgctgcttgagtgacgtctctgtcgtgtgggtgccaagtgcttgtgtagaaactgtgttctgagcccccttttctggacaccaactgtgtcctgtgaatgtatcgctactgtgagctgttcccgcctagccagggccatgtcttaggtgcagctgtgccacgggtcagctgagccacagtcccagaaccaagctctcggtgtctcgggccaccatccgcccacctcgggctgaccccacctcctccatggacagtgtgagccccgggccgtgcatcctgctcagtgtggcgtcagtgtcggggctgagccccttgagctgcttcagtgaatgtacagtgcccggcacgagctgaacctcatgtgttccactcccaataaaaggttgacaggggcttctccttcaaaaaaaaaaaaaaaaaaaaaaaaaaaaaaaaaa

SEQ ID NO: 14892 - DNA, 3132 bp, Homo sapiens
gaagcagaggaggaaggagagaagaggtggaggtggccgcaggctgagtcgcggccgggatgtccgggcagccgccgccgccgccgccgcagcagcagcaacagcagcagcagctgtcgccgccaccgccggcggccttggccccagtctccggagtcgtcctgccggcgcccccggccgtcagcgccggctcttctccggccggctcgcccggcggcggtgcgggcggcgaaggcttaggggccgcggcggccgccctgctcctccaccctccgccgccgccgcccccggccaccgcggccccgccgcccccgccgccgcccccgcctccccctgcctcagcggctgcccccgccagcgggccgcccgctcccccgggccttgcagcgggccccggcccggctggaggagccccgaccccagctctggtggcgggcagcagcgccgcggcccccttccctcacggggactcggccctgaacgagcaggagaaggagttgcagcggcggctgaagcgtctctacccggccgtggacgaacaagagacgccgctgcctcggtcctggagcccgaaggacaagttcagctacatcggcctctctcagaacaacctgcgggtgcactacaaaggtcatggcaaaaccccaaaagatgccgcgtcagttcgagccacgcatccaataccagcagcctgtgggatttattattttgaagtaaaaattgtcagtaagggaagagatggttacatgggaattggtctttctgctcaaggtgtgaacatgaatagactaccaggttgggataagcattcatatggttaccatggggatgatggacattcgttttgttcttctggaactggacaaccttatggaccaactttcactactggtgatgtcattggctgttgtgttaatcttatcaacaatacctgcttttacaccaagaatggacatagtttaggtattgctttcactgacctaccgccaaatttgtatcctactgtggggcttcaaacaccaggagaagtggtcgatgccaattttgggcaacatcctttcgtgtttgatatagaagactatatgcgggagtggagaaccaaaatccaggcacagatagatcgatttcctatcggagatcgagaaggagaatggcagaccatgatacaaaaaatggtttcatcttatttagtccaccatgggtactgtgccacagcagaggcctttgccagatctacagaccagaccgttctagaagaattagcttccattaagaatagacaaagaattcagaaattggtattagcaggaagaatgggagaagccattgaaacaacacaacagttatacccaagtttacttgaaagaaatcctaatctccttttcacattaaaagtgcgtcagtttatagaaatggtgaatggtacagatagtgaagtacgatgtttgggaggccgaagtccaaagtctcaagacagttatcctgttagtcctcgaccttttagtagtccaagtatgagccccagccatggaatgaatatccacaatttagcatcaggcaaaggaagcaccgcacatttttcaggttttgaaagttgtagtaatggtgtaatatcaaataaagcacatcaatcatattgccatagtaataaacaccagtcatccaacttgaatgtaccagaactaaacagtataaatatgtcaagatcacagcaagttaataacttcaccagtaatgatgtagacatggaaacagatcactactccaatggagttggagaaacttcatccaatggtttcctaaatggtagctctaaacatgaccacgaaatggaagattgtgacaccgaaatggaagttgattcaagtcagttgagacgccagttgtgtggaggaagtcaggccgccatagaaagaatgatccactttggacgagagctgcaagcaatgagtgaacagctaaggagagactgtggcaagaacactgcaaacaaaaaaatgttgaaggatgcattcagtctactagcatattcagatccctggaacagcccagttggaaatcagcttgacccgattcagagagaacctgtgtgctcagctcttaacagtgcaatattagaaacccacaatctgccaaagcaacctccacttgccctagcaatgggacaggccacacaatgtctaggactgatggctcgatcaggaattggatcctgcgcatttgccacagtggaagactacctacattagctatgcatttcaagagctcacacttatattgtggcatatagtcaacatggaagtagaccagctctgctgatttgaaatttagattttttaaattatgtactggggacaggtttttgtcgctttacattgcttcctagtttacagcatgatgcaaatgattttctaacttagtgttaggagaaattattttccatctttaacctcttagttgtctaagagttaaatattactgaatttcagacgttcaaattgatcatcacaaatcctttaaaacaattacctaaaagaaaccaaaaatcctgccttctttgtgggggaggggggagagaggggaaggaaatggaacaagttgtgtttgtgttagcatgtgggtgatgtaaacttcaaattgggagatgttccgacccccactcccatataagcattcaatcagtgtaacttgcaaaatgcataaacatccgacagtttgaatttatagtgttgatggaagaaatcatttttaatgtgtactgtaaaacttgaaatactcaggagctgagtgaatatgtttgttgctacttacaatcccgacctgttagtcccagtagttttgttttaacatggtctttttcaactttgtttcctgtttaactacagatgacttctgttgtagactcacaagtttaactgttgtattataacagtattacatgtcaacggtgtggttatgacctttatttatataaaaaccaaatatttagtcaatttaccgtgtcttaatttaatctttgtacaccttccatttttaagtgcttaaatgagtactatattgcaataaaatgtagtgatataattaaccagccattaaaaatttacttctacagaaaaaaaaaaaaaaaaaaaa

SEQ ID NO: 14893 - DNA, 1888 bp, Homo sapiens
agtagtgcttggtttccaacagctgctgctggctcttcctcttgcggccttttcctgaaacggattcttctttcggggaacagaaagcgccagccatgcagccttggcacggaaaggccatgcagagagcttccgaggccggagccactgcccccaaggcttccgcacggaatgccaggggcgccccgatggatcccaacgagtctccggctgcccccgaggccgccctgcctaaggcgggaaagttcggccccgccaggaagtcgggatcccggcagaaaaagagcgccccggacacccaggagaggccgcccgtccgcgcaactggggcccgcgccaaaaaggcccctcagcgcgcccaggacacgcagccgtctgacgccaccagcgcccctggggcagaggggctggagcctcctgcggctcgggagccggctctttccagggctggttcttgccgccagaggggcgcgcgctgctccacgaagccaagacccccgcccgggccctgggacgtgcccagccccggcctgccggtctcggcccccattctcgtacggagggatgcggcgcctggggcctcgaagctccgggcggttttggagaagttgaagctcagccgcgatgatatctccacggcggcggggatggtgaaaggggttgtggaccacctgctgctcagactgaagtgcgactccgcgttcagaggcgtcgggctgctgaacaccgggagctactatgagcacgtgaagatttctgcacctaatgaatttgatgtcatgtttaaactggaagtccccagaattcaactagaagaatattccaacactcgtgcatattactttgtgaaatttaaaagaaatccgaaagaaaatcctctgagtcagtttttagaaggtgaaatattatcagcttctaagatgctgtcaaagtttaggaaaatcattaaggaagaaattaacgacattaaagatacagatgtcatcatgaagaggaaaagaggagggagccctgctgtaacacttcttattagtgaaaaaatatctgtggatataaccctggctttggaatcaaaaagtagctggcctgctagcacccaagaaggcctgcgcattcaaaactggctttcagcaaaagttaggaagcaactacgactaaagccattttaccttgtacccaagcatgcaaaggaaggaaatggtttccaagaagaaacatggcggctatccttctctcacatcgaaaaggaaattttgaacaatcatggaaaatctaaaacgtgctgtgaaaacaaagaagagaaatgttgcaggaaagattgtttaaaactaatgaaataccttttagaacagctgaaagaaaggtttaaagacaaaaaacatctggataaattctcttcttatcatgtgaaaactgccttctttcacgtatgtacccagaaccctcaagacagtcagtgggaccgcaaagacctgggcctctgctttgataactgcgtgacatactttcttcagtgcctcaggacagaaaaacttgagaattattttattcctgaattcaatctattctctagcaacttaattgacaaaagaagtaaggaatttctgacaaagcaaattgaatatgaaagaaacaatgagtttccagtttttgatgaattttgagattgtatttttagaaagatctaagaactagagtcaccctaaatcctggagaatacaagaaaaatttgaaaaggggccagacgctgtggctcacgcctgtggtcccagctactcgggaggcttagacatgagaatcacttgggcccgggaggtggaggttgcagtgagtcaagatggcaccactgcactccatcctgggtgacagagcaagacttcctctcaat

SEQ ID NO: 14894 - DNA, 2370 bp, Homo sapiens
gcaaatcttcaggggccgtccaggactacagagctgtttcaccctaccttggcttcaatctcttcccccatgctcgaaggtgcggagctgtacttcaacgtggaccatggctacctggagggcctggttcgaggatgcaaggccagcctcctgacccagcaagactatatcaacctggtccagtgtgagaccctagaagacctgaaaattcatctccagactactgattatggtaactttttggctaatcacacaaatcctcttactgtttccaaaattgacactgagatgaggaaaagactatgtggagaatttgagtatttccggaatcattccctggagcccctcagcacatttctcacctatatgacgtgcagttatatgatagacaatgtgattctgctgatgaatggtgcattgcagaaaaaatctgtgaaagaaattctggggaagtgccaccccttgggccgtttcacagaaatggaagctgtcaacattgcagagacaccttcagatctctttaatgccattctgatcgaaacgccattagctccattcttccaagactgcatgtctgaaaatgctctagatgaactgaatattgaattgctacgcaataaactatacaagtcttaccttgaggcattctataaattctgtaagaatcatggtgatgtcacagcagaagttatgtgtcccattcttgagtttgaggccgacagacgtgcttttatcatcactcttaactcctttggcactgaattgagcaaagaagaccgagagaccctctatccaaccttcggcaaactctatcctgaggggttgcggctgttggctcaagcagaagactttgaccagatgaagaacgtagcggatcattacggagtatacaaacctttatttgaagctgtaggtggcagtgggggaaagacattggaggacgtgttttacgagcgtgaggtacaaatgaatgtgctggcattcaacagacagttccactacggtgtgttttatgcatatgtaaagctgaaggaacaggaaattagaaatattgtgtggatagcagaatgtatttcacagaggcatcgaactaaaatcaacagttacattccaattttataacccaagtaaggttctcaaatgtagaaaattataaatgttaaaaggaagttattgaagaaaataaaagaaattatgttatattatctagactacacaaaagtaagccacactatatcttcatgagttgcaaatccatggaaacacagtaaaccagccctgaaacaaagcatttccttgttttcagtggtattagatcttgtttccacatgtctgtctcattcttcactgggccttacaggttagttttaattaactctatggtatttttcttattcttgtttgatcatgttaaaaattggacctaataaaagtattttattcttgcttttccatgcttctctacaggtccaaatactgaatgtctcctttactttttctcttttaaatttttttctagacagggtctcactctgtcacctaggctacagtgcagtggtgtgatcacagctcactgcagcctcgacttcccaggctcaagtgatcctcccagctctcagcctccaaagtagctggcactacaagtgtacacccccacacaaggctaagttttgtattttttgtagagacagggtttcaacatattatccaggctggtgtcgaattcctgggctccagggatccacagtcccccttggcctcccaaagtgttgggattacatgcatgagccactgtgctgggcttcatttacattttaactgtctgttccttgcctagattcacagaaatccaaagctgtatgtagtcaacatggttcacaagtgttggaaaatgtgttttttgttttgttttgttttgtttcgttttgttttgagacagagtttccctctgtcgcccaggctagagtgcaatggcgtgatctcggctcactgcaacctccacctcccagattcaagcaactctctgcctcagcctcccgagtagctgggattacaagcacccaccactacactcagctaattttttgtatttttagtagagccggggtttcaccatcttggccaggctgatcttgaactcctgagctcatgatccacccgcctcagcctcccaaagtgctgggattacaggccccttgttcagccactgcacctggccccttattttgtttttgttttctaatatactttgatgtaatcagcttgagaaagcaacacaatttcaaatcctatcttctagatgcaagcagtgttaaatttgttaataaatttgcttttcacacctttctttaaataaaaggtatatctctc

SEQ ID NO: 14895 - DNA, 3405 bp, Homo sapiens
gggataggggatgtggtttgttacaaaggatgagtattttgatagcttctcattccttgaactattctgcaggtttataacaaagctcagaaaatactaaaggttaaaggagaattgagagctgccaaggaaatgaaagatgaggcgggggagagagacagagaagtgagcagcctgaacagcaagctgttaagcctgcaacttgacatcaagaatctgcacgatgtctgcaagagacagaggaagaccttgcaggacaatcagctctgcatggaggaggcaatgaacagcagccacgacaagaagcaagcacaggcattagcattcgaggagtcagaggtggaatttgggtccagtaaacagtgtcatctgagacaactccagcaactgaagaaaaaattgctggtccttcaacaagaactggagtttcacacagaggagttgcagacttcttactattctctccgccagtatcagtccatcctagagaagcagacttccgacctggttcttctgcaccatcactgcaaactgaaagaagatgaggtgattctctatgaggaggaaatgggaaatcacaacgagaacacaggggagaagctccatttggcgcaggagcaactcgccttggccggggacaagatcgcctctctagagaggagcttaaacctctacagggataaataccagtcttccctgagcaacatcgagttactagaatgccaagtgaagatgttgcagggggaactcggcgggatcatgggtcaggagcctgagaacaagggtgatcattcaaaggtacggatatacacttctccttgcatgattcaagagcatcaggagactcagaaacgactgtctgaagtctggcaaaaggtctctcaacaggatgatctcattcaagaacttcgaaataagctggcctgcagtaacgctttggttctggagcgtgaaaaggctttgataaaactacaagccgattttgcttcctgtacagccacccacagataccctcctagctcctcagaagagtgtgaagacatcaaaaagatactgaagcacttgcaggagcagaaagacagccagtgcctgcatgtggaggagtaccagaacctggtgaaggatctgcgcgtggaactagaggccgtgtcggaacagaagagaaacatcatgaaggacatgatgaagctggagctggacctgcacggactgcgggaggagacatctgcccacattgagaggaaggataaggacatcaccatcctgcagtgccggctgcaggagctgcagctggagttcaccgagacccaaaagctcactttgaagaaagacaagttcctccaagagaaagatgagatgctgcaagagctggagaagaaactgacacaggttcagaacagcctcctgaaaaaggagaaggagctggagaagcagcagtgcatggccacagaacttgaaatgacagtcaaggaggctaagcaggacaagtccaaggaggcggagtgcaaggccctgcaggctgaggtccagaagctgaagaacagtctcgaagaggccaagcagcaggagaggctggctgctcagcaagcagcccagtgcaaagaagaggctgcactggcaggctgtcacctggaggacacccagaggaaactgcagaagggtctcctcctggacaagcagaaggcagacaccatccaggaactacagagagaacttcagatgctgcagaaggagtcctcgatggctgagaaggaacaaacctccaacagaaaacgggtggaggagctgtcattagaactctctgaagccctgaggaagcttgaaaattcagacaaggaaaagaggcagcttcagaagacagtggctgagcaggatatgaaaatgaatgacatgcttgatcgtatcaagcaccagcacagggagcaaggctccatcaaatgcaagttagaagaagatcttcaggaggccacaaagcttctggaggacaaacgggagcagttgaagaagagcaaagagcatgagaagctgatggagggagaacttgaagctttgcggcaggaatttaaaaagaaagacaagacgttgaaagagaattccagaaagttggaggaagaaaatgagaatctccgagcagagctacagtgttgttctacacaactggaatcctctctcaacaaatacaacaccagccagcaagtcatccaagacttgaataaagagatagcccttcagaaggagtccttaatgagcctgcaggcccagctggacaaagctctgcagaaggagaagcactatctccagactaccatcaccaaagaagcctatgatgcattatcccggaagtcagccgcctgccaggatgacctgacacaagccctcgagaagctcaatcacgtgacctcagagacaaagagcctgcagcaaagcttgacacagacccaagagaagaaagctcagctggaagaggaaatcattgcttatgaggaaaggatgaaaaagctcaatacggaattaagaaaactgcggggcttccaccaggagagtgagctggaggtgcacgcctttgacaagaagctagaggagatgagctgccaggtgctgcagtggcagaagcaacaccagaatgacctcaagatgctggcagccaaagaggagcagctcagggagttccaggaggagatggccgccttaaaagagaacctccttgaggacgataaggagccctgctgcctgccccagtggtctgtgcccaaagacacctgtaggctctaccgagggaatgatcagattatgaccaacttggagcaatgggcaaaacagcagaaggtcgccaatgagaaactaggaaaccagctccgagagcaggtgaactacattgccaagctgagtggcgaaaaggaccacctccacagtgtaatggtccacttgcagcaggaaaacaagaagctgaagaaggagatagaagagaagaagatgaaagccgagaacacaaggctatgcaccaaagccctaggcccgagcagaacggagtccacacagagggagaaagtgtgcggcaccttgggctggaaggggttgccccaggatatgggtcaaagaatggacctcaccaagtacatcgggatgccccactgcccgggttcctcatactgctagaatccacatctagccctgagcagcatttccacgggtgtttcttcagaggacagtgagttcccagccctccctctctcttgacctggatcagctcttacaggagtatatcacggtcccagcctattttgcaagacactaacttttgttgagttttgtccacttcctgccatggagtgagctttagaaccatactaccatctccaggcccaaactctgaaataaagacatgagcatgagcaaaaaaaaaaa

SEQ ID NO: 14896 - DNA, 7839 bp, Homo sapiens
aacaactggtgcgcatgcgcactggtgtctcgcggcctggcgcgccccctccgaagcgcatgctcgtgggcacgcacgagcctcaagatccaaggtgcgcgcgtcggcgtccgaggcggttggtgtcggagaatttgttaagcgggactccaggcaattatttccagtcagagaaggaaaccagtgcctggcattctcaccatctttctacctaccatgatcaagtgcttgtcagttgaagtacaagccaaattgcgttctggtttggccataagctccttgggccaatgtgttgaggaacttgccctcaacagtattgatgctgaagcaaaatgtgtggctgtcagggtgaatatggaaaccttccaagttcaagtgatagacaatggatttgggatggggagtgatgatgtagagaaagtgggaaatcgttatttcaccagtaaatgccactcggtacaggacttggagaatccaaggttttatggtttccgaggagaggccttggcaaatattgctgacatggccagtgctgtggaaatttcgtccaagaaaaacaggacaatgaaaacttttgtgaaactgtttcagagtggaaaagccctgaaagcttgtgaagctgatgtgactagagcaagcgctgggactactgtaacagtgtataacctattttaccagcttcctgtaaggaggaaatgcatggaccctagactggagtttgagaaggttaggcagagaatagaagctctctcactcatgcacccttccatttctttctctttgagaaatgatgtttctggttccatggttcttcagctccctaaaaccaaagacgtatgttcccgattttgtcaaatttatggattgggaaagtcccaaaagctaagagaaataagttttaaatataaagagtttgagcttagtggctatatcagctctgaagcacattacaacaagaatatgcagtttttgtttgtgaacaaaagactagttttaaggacaaagctacataaactcattgactttttattaaggaaagaaagtattatatgcaagccaaagaatggtcccaccagtaggcaaatgaattcaagtcttcggcaccggtctaccccagaactctatggcatatatgtaattaatgtgcagtgccaattctgtgagtatgatgtgtgcatggagccagccaaaactctgattgaatttcagaactgggacactctcttgttttgcattcaggaaggagtgaaaatgtttttaaagcaagaaaaattatttgtggaattatcaggtgaggatattaaggaatttagtgaagataatggttttagtttatttgatgctactcttcagaagcgtgtgacttccgatgagaggagcaatttccaggaagcatgtaataatattttagattcctatgagatgtttaatttgcagtcaaaagctgtgaaaagaaaaactactgcagaaaacgtaaacacacagagttctagggattcagaagctaccagaaaaaatacaaatgatgcatttttgtacatttatgaatcaggtggtccaggccatagcaaaatgacagagccatctttacaaaacaaagacagctcttgctcagaatcaaagatgttagaacaagagacaattgtagcatcagaagctggagaaaatgagaaacataaaaaatctttcctggaacatagctctttagaaaatccgtgtggaaccagtttagaaatgtttttaagcccttttcagacaccatgtcactttgaggagagtgggcaggatctagaaatatggaaagaaagtactactgttaatggcatggctgccaacatcttgaaaaataatagaattcagaatcaaccaaagagatttaaagatgctactgaagtgggatgccagcctctgccttttgcaacaacattatggggagtacatagtgctcagacagagaaagagaaaaaaaaagaatctagcaattgtggaagaagaaatgtttttagttatgggcgagttaaattatgttccactggctttataactcatgtagtacaaaatgaaaaaactaaatcaactgaaacagaacattcatttaaaaattatgttagacctggtcccacacgtgcccaagaaacatttggaaatagaacacgtcattcagttgaaactccagacatcaaagatttagccagcactttaagtaaagaatctggtcaattgcccaacaaaaaaaattgcagaacgaatataagttatgggctagagaatgaacctacagcaacttatacaatgttttctgcttttcaggaaggtagcaaaaaatcacaaacagattgcatattatctgatacatccccctctttcccctggtatagacacgtttccaatgatagtaggaaaacagataaattaattggtttctccaaaccaatcgtccgtaagaagctaagcttgagttcacagctaggatctttagagaagtttaagaggcaatatgggaaggttgaaaatcctctggatacagaagtagaggaaagtaatggagtcactaccaatctcagtcttcaagttgaacctgacattctgctgaaggacaagaaccgcttagagaactctgatgtttgtaaaatcactactatggagcatagtgattcagatagtagttgtcaaccagcaagccacatccttaactcagagaagtttccattctccaaggatgaagattgtttagaacaacagatgcctagtttgagagaaagtcctatgaccctgaaggagttatctctctttaatagaaaacctttggaccttgagaagtcatctgaatcactagcctctaaattatccagactgaagggttccgaaagagaaactcaaacaatggggatgatgagtcgttttaatgaacttccaaattcagattccagtaggaaagacagcaagttgtgcagtgtgttaacacaagatttttgtatgttatttaacaacaagcatgaaaaaacagagaatggtgtcatcccaacatcagattctgccacacaggataattcctttaataaaaatagtaaaacacattctaacagcaatacaacagagaactgtgtgatatcagaaactcctttggtattgccctataataattctaaagttaccggtaaagattcagatgttcttatcagagcctcagaacaacagataggaagtcttgactctcccagtggaatgttaatgaatccggtagaagatgccacaggtgaccaaaatggaatttgttttcagagtgaggaatctaaagcaagagcttgttctgaaactgaagagtcaaacacgtgttgttcagattggcagcggcatttcgatgtagccctgggaagaatggtttatgtcaacaaaatgactggactcagcacattcattgccccaactgaggacattcaggctgcttgtactaaagacctgacaactgtggctgtggatgttgtacttgagaatgggtctcagtacaggtgtcaaccttttagaagcgaccttgttcttcctttccttccgagagctcgagcagagaggactgtgatgagacaggataacagagatactgtggatgatactgttagtagcgaatcgcttcagtctttgttctcagaatgggacaatccagtatttgcccgttatccagaggttgctgttgatgtaagcagtggccaggctgagagcttagcagttaaaattcacaacatcttgtatccctatcgtttcaccaaaggaatgattcattcaatgcaggttctccagcaagtagataacaagtttattgcctgtttgatgagcactaagactgaagagaatggcgaggcagattcctacgagaagcaacaggcacaaggctctggtcggaaaaaattactgtcttctactctaattcctccgctagagataacagtgacagaggaacaaaggagactcttatggtgttaccacaaaaatctggaagatctgggccttgaatttgtatttccagacactagtgattctctggtccttgtgggaaaagtaccactatgttttgtggaaagagaagccaatgaacttcggagaggaagatctactgtgaccaagagtattgtggaggaatttatccgagaacaactggagctactccagaccaccggaggcatccaagggacattgccactgactgtccagaaggtgttggcatcccaagcctgccatggggccattaagtttaatgatggcctgagcttacaggaaagttgccgccttattgaagctctgtcctcatgccagctgccattccagtgtgctcacgggagaccttctatgctgccgttagctgacatagaccacttggaacaggaaaaacagattaaacccaacctcactaaacttcgcaaaatggcccaggcctggcgtctctttggaaaagcagagtgtgatacaaggcagagcctgcagcaatccatgcctccctgtgagccaccatgagaacagaatcactggtctaaaaggaacaaagggatgttcactgtatgcctctgagcagagagcagcagcagcaggtaccagcacggccctgactgaatcagcccagtgtccctgagcagcttagacagcagggctctctgtatcagtctttcttgagcagatgattcccctagttgagtagccagatgaaattcaagcctaaagacaattcattcatttgcatccatgggcacagaaggttgctatatagtatctaccttttgctacttatttaatgataaaatttaatgacagtttgattggttgcttggtttgttatttgaagggtgtgatttttgtttttgtacagttttttttcaagcttcacatttgcgtgtatctaattcagctgatgctcaagtccaaggggtagtctgccttcccaggctgcccccagggtttctgcactggtcccctcttttcccttcagtcttcttcacttccctatgctgctgcttcatgtgctacatctcagacttaaagagtttctctactacagtgaaaacattctctagggtctttcatcaggcctttagttattttagggataaaaactattgataaaaaggacaaggatagaacagagaaaatttaaagtcctgttccgggttttttgttatgttttctttaaaaactcagagactgatgttcaatatcccaaaccagtaaaatggtgaaaatactatgagcttgttttttaaaatatgattttttttggtactttataaagtatctctttatgtgaaagcaattgtcatatcaaaacacagcatacatacgttcaacctaaccaaatatctttacactttttctttcaggagacaagggttctttgggtccctttcaaacggtatcttggtgttattacattatgcctatctattgcccttataatatcacttgggaccaggactgatcgttctgcaaatgcttgttatgccattctcaatctatttttcccgcaccttttcacatgatttgtggttaataggactcaacagactaaaattgcatagtagaaaaaaaatgcaaaaagccagctggtaatgtttattgcaactggggtgctatacaattagtaagatgatgcaatgagaatttctacttttgtatttcctgaccagcctgctcaaagtggcttttatatcaattgaatgattttcctcattttttaatacaggaaaccaattcgtgctcatggaagaaaagttcctttgccagcagccttgaagtgaatcttacaggagcaatgaaagtattgcattcattagcgtctgccccagagaaggttcagagaaaaccttcacttgttttcaaggggatccttgtagatttacgtaattggaatcctgaagaacaggccctactgtctaaaaaatggcttttattcttctaaatacatataaacggatgttttatagatgggaagacatgaccttagaaaggagagagttttcagaggatttgccaggctgtcaggggctctgcctccaggcccagtgtggcagtgtggcctcagggcctccgcctccctgcttgagggctgcatggaggccaactgtcctgggagttgtaaaaatcttttaaggccagaccaatttgagggattttaaaaagtgtctcagtgcctcttatgatttcagaaggttttgctatatgtaatcccaactactgttttcttgagagtagcagaggattagaaaaagtcctccataaattatgtaaccggccttcctgactagcctgactcaagcaatgtaagagataattattctgttttcataatttataagtgtgggggcatgcctcagcataaaaacaacctattagggaaaaatatctaatagattacctttatcgcctgttagggttttatgttgtttttaactcagatgccataagaacaaagatacatgtaatttataatagtaatcattaatacctatattgtgctttaaggtttacaaaataatttttctcatactttatcttagtttagtttcttgacagtccatgaggtaaggtggtagctttatcaccattttacaaagtgggaaacgaaggttcctcttaggaacctagttgtcacctttgtataataaaacttcgaagctcggagctgttaactggtttgctgaaggcttagctgtaagagccagaattcagacccaggtctgagtgacttcaaactgcacagtccttcccattattacccatatgctatcccttatatttttaatttattaggaattcattcatttataaacttggtgattcacctttattagattctggtcgctgaaggctttagtaacttcagagtaaaacttgagagatgagatgtaaaatgcagccattcttgagagttcctttttctgtaacattcatcaacacttcattgagaagtgaaggttcctatggctgtctctaccttcaagaggcttagctttagtcactgagaaagacaaggaaactaatgatagaatatagtagcttcttctggcgttaggtatcacagagtcacagctagttacagctagccctttattattgaaagaagaggagctagcagtcccactatcagaattaagactagagatggtaataggagctagtatcagaaaagcttaaggcaaagcataaagtgtaggctagaatgaagctggagaatggggagggggcttgggtaacatccagaacctggctggggacctggaactacatgagatgtaagaatggagaggttctagcagtcagaggtcaggtacaaatgaacagctgggatctgcgcatggcagacagtgaaaaaacccaggcaagcaaaatggtcagagcagaaaggggcccaaggccacgttcttgagatgtggagggggctgaggaagccacgccaagtaaggacagatgcagctcagcagttcctagcgagccctgacaagccagctcagctgaagcttcgggtgggagccagtcatggcacagtggagtgaaggaagagcagtttcaggcacccaaaacctgacccccacgacctgttttccacctgaagagccacccattccatccaaacccttggcaaaagtctgctaacagagagaaccggccagtatgctggccagtcgcgatcatgcctgtctttaccctctaagctgaagctgctcatcaacggtgagatggcaaaaaggtgggtccagaagaggggaaaagaagggagtctgtgaaaacaaaatgctgaagaatctgcatcaaataaacccttccttccttcctttttccttcaaaaaaaaaaaaaaa

SEQ ID NO: 14897 - DNA, 4689 bp, Homo sapiens
cccttggtcagaggtcccagagggggcccaggcgacttcctctcaaaggacatgagtagtcagacctgccttccatttttttctgcccttaccttggggggatgaagaactctattttgaggattctgtgaaaagggttgcaacccaactctgttctatttctttgcaggagcctgggtgagttctttctccctatcctgggcctctgtagctccatctgtggaatgggagagttggattaacaccaggctatcccgtagattggaggctgctgttagatgaaactgcaaagtgttctcagtaccctttcctaaatggcctagaatatggctacacttatacatcagttctgaggtaggtgttactagcctcatttttacaaaggcagaaacaaagcgcaaagaaccttgcccaaggtgacagatagggtaagtagtgaaggcaggattggaaccccaggagcctgacttaaggtcgctgctcttaactactatgcagaccaggaaactgaggctccgaagcggggaagtcacctaatgagggtcacacagccttgctacagcggaggcagctgggattccggcctcgcacgcccgagctttagccactgtgcggcgctgtcggggcagcagcccaggcatccgctcagttcctgctcacgtccagcgcccatctccccttccgtgccccagaggctgaaatgggcccaatctgtgttgaagctgcttgtttctgggtcctggagggaggccgggggagaaagaggtctaataggatgggcaggaacccggctagcgagaaacaaggcacagggccaaccttagttgcacaagacttttgagagatgaaggcaacacttggtggaggtcagggttcactgagggggtgtcgggcagggggcggaggaggtcctgccgcctgtcggtggggcccagaaccctgggagccaggaaggtggggggtgtccagtcctcagggcaactggggccagggagaggggagggagaaattaagcggattcccagacccatgaacagacatccagacaaatgccgtttccacagagactcacggagagtgagatagtcacagagactgagacaaacggatgccgagatccagagggtcggagaacaggcaaactcggagcagtagaccggcccgcgccccgggaacgcggccacagcggccggcgctctgcccggcctctccgcgcggagaggggtggcgggcccgacagcggagggaggagagggcgccgccgcaatctcacctctcccaggcccaaggctgcgggcgccaagttcgctcctggtgatcactcgaatgcgtctcccctcgggctggaagccgtgcgggctcgggtgggcgccggcgggccgcgctggggcggcgtgggtcccggcgtctcagcctcgcgctcccactgcgcttcggcccggtggcccgggcgccgccttggggagaggacgggtggggaccgccgccacttccctggctgcggctggcgcccgagtgagccttaacatccaggggctgagcgttctgaaggcggcggcttcagggagcacagggtgcaggagcggcggcgaagacaagggcccgcctccggccactcgagcccagctcccgccgcggcggcggtttgttcccgccgggtccctcagcggaggcgctacgcccgcccctgtcgcctcgccccaccccgcccagggagctccgccctagcccgcagctcttccgccttaggcagccgctaggcgggagggacaatcccccaccaccaaccactgccaccccgaggggactaggggctgaggcccgcccaggtaagggaaagcctcagctccttccgttgcgccccagcggcgggtcccagctcggattcccggggtagtggcgggggccgccggcgggtcgtgccctggaaggtgagcgcggccgagctgggccgccagggggcgctgcggagccgggggacacccctccctgcctgcctcagtcccccgccccctccccgcccgcgcgcaaaacgcactcgccccagaggcagcgcggccgagcccgagccgctgccggagcggagccggagagtggcggcggcggcggcagcggcaccatgaccctgggcagctgctgctgcgagatcatgtcctccgagagctccccggccgcgctgtccgaggccgacgcagacatagacgtggtgggcggcggcagcggcgggggggagctcccagctcgctccgggccccgcgccccccgggacgtgctcccccacggccacgagcctcccgcggaggaagccgaggcagacttagccgaggacgaggaggagtctggtggctgctcggacggcgagccccgcgctctggcgtcccggggggcggcggccgcagcggggagcccggggccaggcgccgcggcggcccgcggcgcagcggggcccgggccgggaccgccgtcggggggcgcggcgacgcggagcccgctggtgaagccgccctactcgtacatcgcgctcatcaccatggccatcctgcagagccccaagaagcggctgacgttgagcgagatctgcgagttcatcagcggccgcttcccctactaccgggagaagttccccgcctggcagaacagcatccgccacaacctctctctcaacgactgcttcgtcaagatcccccgcgagccgggcaacccgggcaagggcaactactggacgctggacccggagtcggccgacatgttcgacaacggcagcttcctgcggcgtcgcaagcgcttcaagcggcagcccctgccgccgccgcacccacacccgcaccctcacccggagctgctgctgcgtggcggggccgcggcggcgggggatcccggcgctttcctgcccggcttcgctgcctacggcgcctacggctacggctacgggctggctctcccggcctacggcgcacccccgccggggccggccccgcatccgcacccgcacccgcacgccttcgctttcgccgcggcagccgccgccgctccttgccagctgtcggtacccccaggccgcgccgccgcgcctccacccggacctccgacggcctcggtgttcgcaggcgcgggatcggccccagctcctgcgcctgcctcaggctcgggcccgggcccgggccccgcaggcctgcccgccttcctgggcgcggagctgggctgcgccaaagccttctacccggcgtccctgagtcctcccgcagccggcaccgcggcgggtctgcccaccgcacttctgcgccagggcctcaagacggacgcgggcggtggtgcaggcggcgggggcgccggggcagggcagaggccttccttctctatagaccacatcatgggccacggtggcggcggggcagcacccccgggcgccggcgagggctctccgggaccgccattcgcggcagccgcgggtcctgggggccaagcccaggtcttggccatgctgactgctccggccctggctcccgttgctggccacattcgcctctcgcatcccggggacgcgctgctgtcctcagggtcccggtttgccagcaaagtcgccggccttagtggctgccacttctgaccgcagcaggcccagggccggttaggtccgcactcctcagcctctcccgggagttcctgcggtcccagcggaactcagggagtctatttatgaagtctccagaccttgggccggcacgcgtgacacggcacttcaggctccacgcacagaatctcgcagatagttgggactaagcgggctctatcgctcagggcgacaggcccggggctacgcgaagaagtcgcaggccaagattctttacagtttgagaaataaaagcaggggggtgggggcttcgtttttttccctgcctctgcgcctctcggggaacacattccgggagagatgcctggccaggctccacggatcccgccagaaacaccaacagagggtctccctttctgcctttcccctctcacttcttccccaacgttgagaccctgcttgtccaatattataatttaaagacatctattatctgctttgtgcttaaaagaaaaattcaaccttttttttttttttttttttgctgttctccaaggaagttcgtttcctctgaagcctaaaccagtgtctacgcaggcggagctgaacggagaggtgaagcagggggtctttatattccctgcagaaaccctggatcccactccactgaggaaaatcctttctcttttgtgtttgggtgcttttaaaggaatttctttcctttcccttggctggctgggtccagccatctccggccagcaaccctgtcagtgttccaccctgtcccaggccctgtgatatttattgtggctaaaggcaatgagattgggtggaagagaagggtctgggccagggactggagaggtgggggtggagtgggcaagggcacaccctgtggcagggggtcctataattttgtgtaaatatctgtacagcgcgctgctctcggcgttctctgtccactgggtgtgcattgatttaaacttctccactgtggggaagctctgtgaaatcgtctgatggtctgtgtggaagaaaagaaaaatctgtctgccgcctatttcccattggtgtcaattgaataaatgtatgtgaacttcaaaaaaaaaaaaaaaaaa

SEQ ID NO: 14898 - DNA, 2272 bp, Homo sapiens
cgccgccacccggcagccccggcgcagctccggcagccgcagtcgcagcgcccccagcgtggcgccccccggccgggcctgccgcccgggacccgggctggggcgcagagggagcccggagcccggcgcccccatgcgccgccccgccgccgccgcgccacagctatgaccctgagcactgagatgtccgatgcctctggcctcgccgaggaaacagacatcgacgtggtgggggagggcgaggacgaagaagacgaggaagaggaggacgacgacgagggcggcggtggcgggccccggctggctgtccccgcgcagcggcggcggcggcggcgctcgtacgccggggaggacgagctggaggatctggaggaggaggaggacgacgatgacatcctgctggccccgcctgctgggggctccccggcgcccccgggcccggccccggcggcgggggcaggagccggtgggggcggcggcggcggcggcgcgggcggcggcgggagcgcgggtagcggcgccaagaacccgctggtgaagccgccctactcgtatatcgcgctcatcactatggccatcctgcagagccccaagaagcggctgacgctgagcgagatctgtgagttcatcagcggccgcttcccctactaccgggagaagttccccgcctggcagaacagcatccgccacaacctctcgctcaacgactgcttcgtcaagatcccccgcgagcccggcaacccgggcaagggcaactactggacgctggacccggagtccgccgacatgttcgacaacggcagcttcctgcgccggaggaagcgcttcaagcggcagccgctgctcccacccaacgccgcggccgccgagtctctgctgctgcgcggcgcgggagccgcagggggcgcgggcgacccggcagccgccgccgcgctcttcccgcccgcgcccccgccgcccccgcatgcctacggctacggcccctacggctgcggctacggcctgcagctgccgccttacgcgccgccctcggccctcttcgccgccgcagcggccgccgccgccgccgccgccttccacccgcactcgcccccgccgcccccgccaccgcacggcgcggccgccgagctggcccggaccgccttcggctaccggccgcacccgctcggcgccgccctacccggccccctgccggcctccgcggccaaggcgggcggcccgggcgcctcagcgctggcgcgctcgcccttctccatcgagagcatcatcgggggcagcttgggcccggccgccgctgccgccgccgccgcgcaggccgccgccgccgctcaggcctcgccctcgccctcgccggtggcggcgccgccagctcccggatccagcggaggaggctgcgcggcgcaggcggccgtgggcccggcggccgcgctcacccgatccctcgtggccgccgcggccgccgccgcctcctcagtctcctcgtccgccgccttggggactctgcaccaagggactgccctgtccagtgtcgagaactttactgctaggatttccaattgttaataacgctatgttagcgcgctcgaggaagaaggtaggaatcccggctccttttctcgtcttggtggttcggtgttttgttcgctcctccaggcgcggcccctctcgacctcgcgcgcccattttcgccgctgcgaattctcggacaaaactgtcaacagcccgggcgcgccttttggctctgcgggtccctctatttatgcaaagccgacctatgctacagccccccaacccccgacctggggtagggaggaagagggtgccggggaagggagtccgccctgtccaggcactagaggctcccttgacgtttggcagatgaaaaacaactaagcctttttgaggtgtagagattctcaggtccaggcgttaaaaaataatggtcaaaagaataatacaaaaatagtaaaggtcttgaagaatgccagcgaagcaattcttttttatttgaggacacttgtctggtgtactttttcatgaaaaggaaaaatggttaacatgtttacacaagaaaaaaagtcaaaattatcatttatttcaacctgtgttttgtatcataacagacgtgtggatttttttgtacttactgcgtattctttacaaggagtattgtaaattttactggcaattattattgtactattctaaatgtaagatttttacactttttcagaaataaaaatgcttaattttcaaagaaaattcaccaaaa

SEQ ID NO: 14899 - DNA, 6111 bp, Homo sapiens
aacaggtttgatctgtggatgaaatgaatcatgattttcaagctcttgcattagaatctcggggaatgggagagcttttgcctaccaaaaagttttgggaacctgatgattcaacaaaagatggacaaaaaggcatatttcttggggatgatgaatggagagagactgcatggggagcttctcaccattcaatgtcccagcctattatggtacagagaagatctggacagggttttcatggaaacagtgaagtaaatgcaatactgtctccgcgatcagaaagtggaggccttggtgtgagcatggtagaatatgtattaagttcttctcctgctgataaattggattctcgatttaggaagggaaattttggcactagagatgctgaaacagatggacctgagaaaggagatcaaaaaggcaaggcttctccatttgaggaggaccaaaacagagatcttaaacaaggagatgatgatgattctaaaataaatggcagaggtttgccaaatggaatggatgccgattgcaaagattttaatcgtactcctggaagtcgtcaagcctctccaactgaagtagttgagcgcttgggccccaatactaatccctcagaaggactggggcctcttcctaatcctacagctaataaaccacttgttgaagaattttcaaatcctgaaactcagaatctggatgccatggaacaagttggtctggaatccttacagtttgactatcctggtaatcaggtaccaatggactcttcaggagctactgtaggcctttttgactacaattcccagcagcagctctttcagaggactaatgcactaacagttcaacagttaactgcagctcaacagcagcaatatgcattagcagcagctcagcagccacatatagctggtgtattctcagcaggccttgctccagctgcatttgtgccaaatccatacattattagtgctgctcctccagggaccgatccgtatactgcagcaggattggctgcagcagctacattagcaggtccagcagtggttccacctcagtattacggcgttccatggggggtgtatccagccaacttatttcagcagcaagctgcagctgcggcaaataacacagccagtcagcaagcagcatcacaagctcagcctggacagcaacaggttctccgtgctggagcaggtcagcgtcctcttactcccaatcagggtcagcaagggcagcaagcagaatcacttgcggcagctgcagcagcaaatccaacattggcttttggtcagggtcttgctactggcatgccaggctatcaagtactagctccaactgcctattatgatcagactggtgccttagtggttggccctggagcaaggactggccttggagctccagttcggttaatggctccaacacctgttttaattagttcagcagcagcacaagctgcagcagcagcagcagctggaggaactgcaagtagccttacaggcagcacaaatggtctgtttcggccaattggcactcagccaccacagcagcagcaacagcagccaagcactaatctgcaatctaattcattttatggaagcagttctttgactaatagctcccagagtagttctttattttctcatggacctggtcaacctggaagtacatctcttggctttggaagtggtaactctttgggtgctgctataggctcagccctcagtggatttggttcatcagttggcagttctgcaagtagtagtgccacaaggagagagtctctatctactagctctgacttgtacaaaagatctagtagcagcctagcacccatagggcaaccattttacaatagtctgggattttcctcctctccaagtccaataggcatgcctctgccaagccaaactccaggacattcacttacgccaccgccatcactttcatcacatggatcctcatccagtttgcatttaggaggactgacaaatggtagtggtcgatatatctctgcagcacctggagcagaagcaaaatatcgaagtgcttcaagcacttccagtctatttagctccagcagccagctctttcctccttcccggcttcggtataataggtctgatattatgccttctggccgcagtagattattggaagatttcagaaacaaccgcttcccaaaccttcagcttagagacttgattggacatatagttgagttttctcaagaccagcatggttctagattcatacagcaaaaactagagagagctactccagctgagcgacagatggtatttaatgaaattctgcaagcagcctatcaattaatgactgatgtttttggcaactatgttatacagaagttttttgagtttgggagtctggatcaaaaattagccctggctactcgtattcgtggtcatgttctacccttagccttgcagatgtatggctgccgcgttattcagaaagcattagaatctatttcttctgaccagcagagtgaaatggtaaaggagctggatggtcatgtgctcaaatgtgtgaaagatcagaatggaaaccatgttgtacaaaaatgtatcgaatgtgttcagccacagtcactacagttcatcattgatgctttcaagggacaagtatttgtgctttcaactcatccttatggctgcagagtaattcagcgcatcctagagcattgcactgcagaacagaccttacctatcttagaagaactccaccaacatacagagcagttggtacaggatcagtatggcaattatgttattcagcatgtactggaacacggtcgacctgaagacaagagcaaaattgtttccgaaatcaggggaaaggttttagccctgagtcaacacaaatttgccagcaatgtagtagaaaagtgtgttactcatgcctcccgtgctgagagagctttactgattgacgaggtttgctgccagaatgatggtcctcacagtgccttatacaccatgatgaaggaccagtatgccaattacgtggttcaaaagatgattgatatggctgaacctgctcagagaaagataatcatgcacaagattcgacctcacattactactttgcgcaaatacacatacgggaagcatatactggccaagttggaaaagtattatttgaagaatagcccggacctaggacctattggaggaccaccaaatggaatgctgtaaattacaggagcaagagaaagaagataatttaaccatgtgaaaagaatttttttgtgtgtgaattatcaaaacacaactcaactatgaatcttcaatttttttttaaagcaaaactatttattgactttattcatccatttgtaaattttttaaggttcttgtgtatatttggggggtgggggatgaattataaattatattcagccctgagtggagacctatcagattggattgctggcaaagcacagaatgcctgtatatgatgtaactgtatcaaaaataaaaagctgtcacatattttgtaaatttttaccttgtaaagtcacaaaaatagtttttaaaggaaaaagtacagtattcttttaataaactggctcacagtctggtaggtctacaaccccatagcacaacaggtttatagagatgtatatagaattatagtccttatttttttcctttgcgtgaaaccttttataacagattaacaatcaactgcataaatattattaatattttaaaaagagttaagttgtattttgataattcacaaactatcatgcaaataacgagtaagtagacaagaataaagtggtttgagatgaaaagaacctaacattatttacagtagatgtggttttaatacaattactgccctaaaatgtctctggcaatgtacagaaatattgtatatacttacatatgtaattgttgtaagagttaaatacaaaatcatggtgacacttccaattaagtgcactaaatgaaaagttaagtcacttattaacttttcagtttggtttgcaatgagaaagagtggaaatttgtattttgttttgcttatagaattacagacatgttgaggaagtgttgagctttattttgctttttcatagaggcagaaagtaggaaccagatagagatgaaaaggggccactgaaaagtgaatttgatagctcagcatttaagcatgattacatattcagatagctctttttgctttctataaatatatgcattgtgtgtgtagtaatagatgtaagtttacactttgaaaggaaatcttgtttcaatgtttattataaaagccttgctaatttagtagtgatgctttccttggttgtacaggtgtacatttgtaaaccttcatgctgtaaatggaatttgttttatctctttgggatacatttgcattttagtgtacatttacgtccctgccctctttgacctggcaatatagtgttgtataatgtaaatttatttctccaaatcgagagtgattttttaaaaattttttatctttatatggtttcagaagtatgaaccagctttctttttattattgtgagatcattttgttttataacatagttgttgactgttaatatggacctgctagaatttggatcactttcaattgaagtcagggtattgtgcataatagaaagtattggactgagatatttggttaccatggaggccaatgcttttttcatcttattaaatgtgatgtgacttttttctttgtacagaagagtactgtatttttgaatagcctactcccaagtaagagcaaatctgtatgataacattttttcctctggacataagacataacagtaacacgatgtacatttacaagcggccttatgtacatttcccaacaatctttttaaggcaaaattgtgaccatatgtgtataattaaaatcgtttttaatcctttgcctatgaaaatattttggaaaaaaacttgctgtgtatattcagtttctgaaagataaagaaagtgctttgtattttgttgaagtcagtattttgtataaacatttatgttgacccacttatgttcagtgctgaaaactaaaatgaacatgctattctgtcagctgaatatggaagagatctttttttactagagatctgcagaagaaacgcaatcttctgagcacaatatggaatctaaaggttttatcacttagttgttcatattatgaacctaaaaataatggcataaagtttggggatgccaggcatactttttcatgtttggtgttgagttattttacttttctaacccaacattccttggtgagaccattaaatccaaacacttgtcaccgttccttctcatagtcactctgggtcatcagcatgtcccagtcactgcagcaacgccttgtgtttgtttcatttttttaaaacccacacaaagccgctgtctcactttttcctactttaccaacctcagagtatttcggcccgtatcgaacttttgttctcagtatcagcccatggtttcaggatcaaagctgtcatgttggagattggtaatggctttcctgtctttgtacagttgaattcctagtcttccttcatccttgccctctgttggcacaggcattatctctgcaattttagaaaatgacaagtagagaatactacattgagaaactaaaccctcttcttggggtcctgatactcattcccatttgtcccagtgctgacaacccaatcttcccaatactttcaggcctgctctacaaaagtacctgttcttgtagaaattttacagtctgccattttgggtgcccaccccaatttttaccttttagtaagttggcatgaaattttggtaaaatctgaaaatcacatttcagaataaaacaattgggcaaaactacctaggctttactcttgagtgtctccttttgatagggattgtttctggaccagtttgtctaagtcctggctcttattggttcatatgaaataatgttaacttcacttctttgtatattatgtataaattagaaaatgaaaaatgtgtgaataacattgtatgaaataaacctggtcttgtgtttttctctagataaaataaaaatctgtacctc

SEQ ID NO: 14900 - DNA, 6319 bp, Homo sapiens
attgtttgaatttgaaaacggtaacatcgcagtgctgctcgcgggtctggctagtcaggcgaagtttgcagaatggaatctaattttaatcaagagggagtacctcgaccatcttatgtttttagtgctgacccaattgcaaggccttcagaaataaatttcgatggcattaagcttgatctgtctcatgaattttccttagttgctccaaatactgaggcaaacagtttcgaatctaaagattatctccaggtttgtcttcgaataagaccatttacacagtcagaaaaagaacttgagtctgagggctgtgtgcatattctggattcacagactgttgtgctgaaagagcctcaatgcatccttggtcggttaagtgaaaaaagctcagggcagatggcacagaaattcagtttttccaaggtttttggcccagcaactacacagaaggaattctttcagggttgcattatgcaaccagtaaaagacctcttgaaaggacagagtcgtctgatttttacttacgggctaaccaattcaggaaaaacatatacatttcaagggacagaagaaaatattggcattctgcctcgaactttgaatgtattatttgatagtcttcaagaaagactgtatacaaagatgaaccttaaaccacatagatccagagaatacttaaggttatcatcagaacaagagaaagaagaaattgctagcaaaagtgcattgcttcggcaaattaaagaggttactgtgcataatgatagtgatgatactctttatggaagtttaactaactctttgaatatctcagagtttgaagaatccataaaagattatgaacaagccaacttgaatatggctaatagtataaaattttctgtgtgggtttctttctttgaaatttacaatgaatatatttatgacttatttgttcctgtatcatctaaattccaaaagagaaagatgctgcgcctttcccaagacgtaaagggctattcttttataaaagatctacaatggattcaagtatctgattccaaagaagcctatagacttttaaaactaggaataaagcaccagagtgttgccttcacaaaattgaataatgcttccagtagaagtcacagcatattcactgttaaaatattacagattgaagattctgaaatgtctcgtgtaattcgagtcagtgaattatctttatgtgatcttgctggttcagaacgaactatgaagacacagaatgaaggtgaaaggttaagagagactgggaatatcaacacttctttattgactctgggaaagtgtattaacgtcttgaagaatagtgaaaagtcaaagtttcaacagcatgtgcctttccgggaaagtaaactgactcactattttcaaagtttttttaatggtaaagggaaaatttgtatgattgtcaatatcagccaatgttatttagcctatgatgaaacactcaatgtattgaagttctccgccattgcacaaaaagtttgtgtcccagacactttaaattcctctcaagagaaattatttggacctgtcaaatcttctcaagatgtatcactagacagtaattcaaacagtaaaatattaaatgtaaaaagagccaccatttcatgggaaaatagtctagaagatttgatggaagacgaggatttggttgaggagctagaaaacgctgaagaaactcaaaatgtggaaactaaacttcttgatgaagatctagataaaacattagaggaaaataaggctttcattagccacgaggagaaaagaaaactgttggacttaatagaagacttgaaaaaaaaactgataaatgaaaaaaaggaaaaattaaccttggaatttaaaattcgagaagaagttacacaggagtttactcagtattgggctcaacgggaagctgactttaaggagactctgcttcaagaacgagagatattagaagaaaatgctgaacgtcgtttggctatcttcaaggatttggttggtaaatgtgacactcgagaagaagcagcgaaagacatttgtgccacaaaagttgaaactgaagaagctactgcttgtttagaactaaagtttaatcaaattaaagctgaattagctaaaaccaaaggagaattaatcaaaaccaaagaagagttaaaaaagagagaaaatgaatcagattcattgattcaagagcttgagacatctaataagaaaataattacacagaatcaaagaattaaagaattgataaatataattgatcaaaaagaagatactatcaacgaatttcagaacctaaagtctcatatggaaaacacatttaaatgcaatgacaaggctgatacatcttctttaataataaacaataaattgatttgtaatgaaacagttgaagtacctaaggacagcaaatctaaaatctgttcagaaagaaaaagagtaaatgaaaatgaacttcagcaagatgaaccaccagcaaagaaagggtctatccatgttagttcagctatcactgaagaccaaaagaaaagtgaagaagtgcgaccgaacattgcagaaattgaagacatcagagttttacaagaaaataatgaaggactgagagcatttttactcactattgagaatgaacttaaaaatgaaaaggaagaaaaagcagaattaaataaacagattgttcattttcagcaggaactttctctttctgaaaaaaagaatttaactttaagtaaagaggtccaacaaattcagtcaaattatgatattgcaattgctgaattacatgtgcagaaaagtaaaaatcaagaacaggaggaaaagatcatgaaattgtcaaatgagatagaaactgctacaagaagcattacaaataatgtttcacaaataaaattaatgcacacgaaaatagacgaactacgtactcttgattcagtttctcagatttcaaacatagatttgctcaatctcagggatctgtcaaatggttctgaggaggataatttgccaaatacacagttagaccttttaggtaatgattatttggtaagtaagcaagttaaagaatatcgaattcaagaacccaatagggaaaattctttccactctagtattgaagctatttgggaagaatgtaaagagattgtgaaggcctcttccaaaaaaagtcatcagattgaggaactggaacaacaaattgaaaaattgcaggcagaagtaaaaggctataaggatgaaaacaatagactaaaggagaaggagcataaaaaccaagatgacctactaaaagaaaaagaaactcttatacagcagctgaaagaagaattgcaagaaaaaaatgttactcttgatgttcaaatacagcatgtagttgaaggaaagagagcgctttcagaacttacacaaggtgttacttgctataaggcaaaaataaaggaacttgaaacaattttagagactcagaaagttgaatgtagtcattcagccaagttagaacaagacattttggaaaaggaatctatcatcttaaagctagaaagaaatttgaaggaatttcaagaacatcttcaggattctgtcaaaaacaccaaagatttaaatgtaaaggaactcaagctgaaagaagaaatcacacagttaacaaataatttgcaagatatgaaacatttacttcaattaaaagaagaagaagaagaaaccaacaggcaagaaacagaaaaattgaaagaggaactctctgcaagctctgctcgtacccagaatctgaaagcagatcttcagaggaaggaagaagattatgctgacctgaaagagaaactgactgatgccaaaaagcagattaagcaagtacagaaagaggtatctgtaatgcgtgatgaggataaattactgaggattaaaattaatgaactggagaaaaagaaaaaccagtgttctcaggaattagatatgaaacagcgaaccattcagcaactcaaggagcagttaaataatcagaaagtggaagaagctatacaacagtatgagagagcatgcaaagatctaaatgttaaagagaaaataattgaagacatgcgaatgacactagaagaacaggaacaaactcaggtagaacaggatcaagtgcttgaggctaaattagaggaagttgaaaggctggccacagaattggaaaaatggaaggaaaaatgcaatgatttggaaaccaaaaacaatcaaaggtcaaataaagaacatgagaacaacacagatgtgcttggaaagctcactaatcttcaagatgagttacaggagtctgaacagaaatataatgctgatagaaagaaatggttagaagaaaaaatgatgcttatcactcaagcgaaagaagcagagaatatacgaaataaagagatgaaaaaatatgctgaggacagggagcgtttttttaagcaacagaatgaaatggaaatactgacagcccagctgacagagaaagatagtgaccttcaaaagtggcgagaagaacgagatcaactggttgcagctttagaaatacagctaaaagcactgatatccagtaatgtacagaaagataatgaaattgaacaactaaaaaggatcatatcagagacttctaaaatagaaacacaaatcatggatatcaagcccaaacgtattagttcagcagatcctgacaaacttcaaactgaacctctatcgacaagttttgaaatttccagaaataaaatagaggatggatctgtagtccttgactcttgtgaagtgtcaacagaaaatgatcaaagcactcgatttccaaaacctgagttagagattcaatttacacctttacagccaaacaaaatggcagtgaaacaccctggttgtaccacaccagtgacagttaagattcccaaggctcggaagaggaagagtaatgaaatggaggaggacttggtgaaatgtgaaaataagaagaatgctacacccagaactaatttgaaatttcctatttcagatgatagaaattcttctgtcaaaaaggaacaaaaggttgccatacgtccatcatctaagaaaacatattctttacggagtcaggcatccataattggtgtaaacctggccactaagaaaaaagaaggaacactacagaaatttggagacttcttacaacattctccctcaattcttcaatcaaaagcaaagaagataattgaaacaatgagctcttcaaagctctcaaatgtagaagcaagtaaagaaaatgtgtctcaaccaaaacgagccaaacggaaattatacacaagtgaaatttcatctcctattgatatatcaggccaagtgattttaatggaccagaaaatgaaggagagtgatcaccagattatcaaacgacgacttcgaacaaaaacagccaaataaatcacttatggaaatgtttaatataaattttatagtcatagtcattggaacttgcatcctgtattgtaaatataaatgtatatattatgcattaaatcactctgcatatagattgctgttttatacatagtataattttaattcaataaatgagtcaaaatttgtatatttttataaggcttttttataatagcttctttcaaactgtatttccctattatctcagacattggatcagtgaagatcctaggaaagaggctgttattctcatttattttgctatacaggatgtaataggtcaggtatttggtttacttatatttaacaatgtcttatgaattttttttactttatctgttatacaactgattttacatatctgtttggattatagctaggatttggagaataagtgtgtacagatcacaaaacatgtatatacattatttagaaaagatctcaagtctttaattagaatgtctcacttattttgtaaacattttgtgggtacatagtacatgtatatatttacggggtatgtgagatgttttgacacaggcatgcaatgtgaaatacgtgtatcatggagaatgaggtatccatcccctcaagcatttttcctttgaattacagataatccaattacattctttagatcatttaaaaatatacaagtaagttattattgattatagtcactctattgtgctatcagatagtagatcattctttttatcttatttgtttttgtacccattaaccatccccacctccccctgcaaccgtcagtacccttaccagccactggtaaccattcttctactctgtatgcccatgaggtcaattgattttatttttagatcccataaataaatgagaacatgcagtctttgtcaaaaaaaaa

SEQ ID NO: 14901 - DNA, 2110 bp, Homo sapiens
gaacccggtctcccgcaagatggagccgggttgggctgtgacgctgctgctggggtcagaatgtcatacccaggctatcccccaacaggctacccacctttccctggatatcctcctgcaggtcaggagtcatcttttcccccttctggtcagtatccttatcctagtggctttcctccaatgggaggaggtgcctacccacaagtgccaagtagtggctacccaggagctggaggctaccctgcgcctggaggttatccagcccctggaggctatcctggtgccccacagccagggggagctccatcctatcccggagttcctccaggccaaggatttggagtcccaccaggtggagcaggcttttctgggtatccacagccaccttcacagtcttatggaggtggtccagcacaggttccactacctggtggctttcctggaggacagatgccttctcagtatcctggaggacaacctacttaccctagtcagcctgccacagtgactcaggtcactcaaggaactatccgaccagctgccaacttcgatgctataagagatgcagaaattcttcgtaaggcaatgaagggttttgggacagatgagcaggcaattgtggatgtggtggccaaccgttccaatgatcagaggcaaaaaattaaagcagcatttaagacctcctatggcaaggatttaatcaaagatctcaaatcagagttaagtggaaatatggaagaactgatcctggccctcttcatgcctcctacgtattacgatgcctggagcttacggaaagcaatgcagggagcaggaactcaggaacgtgtattgattgagattttgtgcacaagaacaaatcaggaaatccgagaaattgtcagatgttatcagtcagaatttggacgagaccttgaaaaggacattaggtcagatacatcaggacattttgaacgtttacttgtgtccatgtgccagggaaatcgtgatgagaaccagagtataaaccaccaaatggctcaggaagatgctcagcgtctctatcaagctggtgaggggagactagggaccgatgaatcttgctttaacatgatccttgccacaagaagctttcctcagctgagagctaccatggaggcttattctaggatggctaatcgagacttgttaagcagtgtgagccgtgagttttccggatatgtagaaagtggtttgaagaccatcttgcagtgtgccctgaaccgccctgccttctttgctgagaggctctactatgctatgaaaggtgctggcacagatgactccaccctggtccggattgtggtcactcgaagtgagattgaccttgtacaaataaaacagatgttcgctcagatgtatcagaagactctgggcacaatgattgcaggtgacacgagtggagattaccgaagacttcttctggctattgtgggccagtaggagggatttttttttttttaatgaaaaaaaaatttctattcatagcttatccttcagagcaatgacctgcatgcagcaatatcaaacatcagctaaccgaaagagctttctgtcaaggaccgtatcagggtaatgtgcttggtttgcacatgttgttattgccttaattctaattttattttgttctctacatacaatcaatgtaaagccatatcacaatgatacagtaatattgcaatgtttgtaaaccttcattcttactagtttcattctaatcaagatgtcaaattgaataaaaatcacagcaatctctgattctgtgtaataatattgaataattttttagaaggttactgaaagctctgccttccggaatccctctaagtctgcttgatagagtggatagtatgttaaaactgtgtactttaaaaaaaaattcaacctttacatctagaataatttgcatctcattttgcctaaattggttctgtattcataaacactttccacatagaaaatagattagtattacctgtggcaccttttaagaaagggtcaaatgtttatatgcttaagatacatagcctccctttttttcgcgttgtttcctttttttaaattgagttatgacaaataaaaaattgcatat

SEQ ID NO: 14902 - DNA, 2176 bp, Homo sapiens
gaacccggtctcccgcaagatggagccgggttgggctgtgacgctgctgctggggtcagaatgtcatacccaggctatcccccaacaggctacccacctttccctggatatcctcctgcaggtcaggagtcatcttttcccccttctggtcagtatccttatcctagtggctttcctccaatgggaggaggtgcctacccacaagtgccaagtagtggctacccaggagctggaggctaccctgcgcctggaggttatccagcccctggaggctatcctggtgccccacagccagggggagctccatcctatcccggagttcctccaggccaaggatttggagtcccaccaggtggagcaggcttttctgggtatccacagccaccttcacagtcttatggaggtggtccagcacaggttccactacctggtggctttcctggaggacagatgccttctcagtatcctggaggacaacctacttaccctagtcagatcaatacagattctttttcttcctatcctgttttctctcctgtttctttggattatagcagtgaacctgccacagtgactcaggtcactcaaggaactatccgaccagctgccaacttcgatgctataagagatgcagaaattcttcgtaaggcaatgaagggttttgggacagatgagcaggcaattgtggatgtggtggccaaccgttccaatgatcagaggcaaaaaattaaagcagcatttaagacctcctatggcaaggatttaatcaaagatctcaaatcagagttaagtggaaatatggaagaactgatcctggccctcttcatgcctcctacgtattacgatgcctggagcttacggaaagcaatgcagggagcaggaactcaggaacgtgtattgattgagattttgtgcacaagaacaaatcaggaaatccgagaaattgtcagatgttatcagtcagaatttggacgagaccttgaaaaggacattaggtcagatacatcaggacattttgaacgtttacttgtgtccatgtgccagggaaatcgtgatgagaaccagagtataaaccaccaaatggctcaggaagatgctcagcgtctctatcaagctggtgaggggagactagggaccgatgaatcttgctttaacatgatccttgccacaagaagctttcctcagctgagagctaccatggaggcttattctaggatggctaatcgagacttgttaagcagtgtgagccgtgagttttccggatatgtagaaagtggtttgaagaccatcttgcagtgtgccctgaaccgccctgccttctttgctgagaggctctactatgctatgaaaggtgctggcacagatgactccaccctggtccggattgtggtcactcgaagtgagattgaccttgtacaaataaaacagatgttcgctcagatgtatcagaagactctgggcacaatgattgcaggtgacacgagtggagattaccgaagacttcttctggctattgtgggccagtaggagggatttttttttttttaatgaaaaaaaaatttctattcatagcttatccttcagagcaatgacctgcatgcagcaatatcaaacatcagctaaccgaaagagctttctgtcaaggaccgtatcagggtaatgtgcttggtttgcacatgttgttattgccttaattctaattttattttgttctctacatacaatcaatgtaaagccatatcacaatgatacagtaatattgcaatgtttgtaaaccttcattcttactagtttcattctaatcaagatgtcaaattgaataaaaatcacagcaatctctgattctgtgtaataatattgaataattttttagaaggttactgaaagctctgccttccggaatccctctaagtctgcttgatagagtggatagtatgttaaaactgtgtactttaaaaaaaaattcaacctttacatctagaataatttgcatctcattttgcctaaattggttctgtattcataaacactttccacatagaaaatagattagtattacctgtggcaccttttaagaaagggtcaaatgtttatatgcttaagatacatagcctccctttttttcgcgttgtttcctttttttaaattgagttatgacaaataaaaaattgcatat

SEQ ID NO: 14903 - DNA, 2762 bp, Homo sapiens
gccaagcatacatctctaattttattattttggtcttttcgttggattttccctttcttctttttttcgggttatcgctcagttttgagcagaggtttacattttttaaaaatttgctttccagcccgccttgatcttctaagtgcgagttcatcgtctgagaaaaaaaaaaatctctggttggcgtttttgtttcttttcttttctttcttttctttcctttttttttttttttaatttttttcaagggggaggagattttccacaagaaaaggttgttttcatgtttgggattcaggaaagcatccaacggagtggaagcagcatgaaggaagagccgctgggcagcggcatgaacgcggtgcggacgtggatgcagggcgccggggtgctggacgccaacacggcggcgcagagcggggtgggtctggcccgggctcactttgagaagcagccgccttccaatctgcggaaatccaacttcttccacttcgtcctggccctctacgacagacagggccagcccgtggagatcgagaggacagcgtttgtggggttcgtggagaaggaaaaagaagccaacagcgaaaagaccaataacggaattcactaccggcttcagcttctctacagcaatgggataaggacggagcaggatttctacgtgcgcctcattgactccatgacaaaacaagccatagtgtatgaaggccaagacaagaacccagaaatgtgccgagtcttgctcacacatgagatcatgtgcagccgctgttgtgacaagaaaagctgtggcaaccgaaatgagactccctcagatccagtgataattgacaggttcttcttgaaatttttcctcaaatgtaaccaaaattgcctaaagaatgcgggaaacccacgtgacatgcggagattccaggtcgtggtgtctacgacagtcaatgtggatggccatgtcctggcagtctctgataacatgtttgtccataataattccaagcatgggcggagggctcggaggcttgacccctcggaaggtacgccctcttatctggaacatgctactccctgtatcaaagccatcagcccgagtgaaggatggacgacgggaggtgcgactgtgatcatcataggggacaatttctttgatgggttacaggtcatattcggtaccatgctggtctggagtgagttgatcactcctcatgccatccgtgtgcagacccctcctcggcacatccctggtgttgtggaagtcacactgtcctacaaatctaagcagttctgcaaaggaacaccaggcagattcatttatacagcgctcaacgaacccaccatcgattatggtttccagaggttacagaaggtcattcctcggcaccctggtgaccctgagcgtttgccaaaggaagtaatactcaaaagggctgcggatctggtagaagcactgtatgggatgccacacaacaaccaggaaatcattctgaagagagcggccgacattgccgaggccctgtacagtgttccccgcaaccacaaccaactcccggcccttgctaacacctcggtccacgcagggatgatgggcgtgaattcgttcagtggacaactggccgtgaatgtctccgaggcatcacaagccaccaatcagggtttcacccgcaactcaagcagcgtatcaccacacgggtacgtgccgagcaccactccccagcagaccaactataactccgtcaccacgagcatgaacggatacggctctgccgcaatgtccaatttgggcggctcccccaccttcctcaacggctcagctgccaactccccctatgccatagtgccatccagccccaccatggcctcctccacaagcctcccctccaactgcagcagctcctcgggcatcttctccttctcaccagccaacatggtctcagccgtgaaacagaagagtgctttcgcaccagtcgtcagaccccagacctccccacctcccacctgcaccagcaccaacgggaacagcctgcaagcgatatctggcatgattgttcctcctatgtgaaagaattgccttgaagaattgtattaatgaagaggttggattctgctacagagagtaatctgatacaagtcccagagtggaacttttaactcaggcctttttaagaggaatcacaataactgcagatttttaaacaaacaaaatcaccgaccttgcaaatactgaaattggaagagggatctgcaagtgcagggtgttggttaaagttgtacctcccaagtatttgggggatatatttattctgtattgacaaaagcaaatccactttttctttttcttttttttttttaagcttaattctgcaatcatttgtcttttataaaccgtaaagctctatacaagggacactataaataagactccatgttttaatttatgatgtttttaaagctgtgtaaaggaagaatgaagtggtgatatttacaaaaaagtaaaaaaaaaaaaaaagaaaaaaaggaaaaaaaaaaaaaaaaaaaaaaaaaaataggaatgccagttagattttttagaaaaactaagggtcggcttttgcgccttaaagcatatcaaatggtagttagctcagacagtgcattttcaatatctaacttaacatgccaccccttagcagtgcaagcttatttatctcttttgtattgttgtcttaagcaactgtgtaaataaatgcagcctggaaagttaaaacgcgaaaaaaaaaaaaaaa

SEQ ID NO: 14904 - DNA, 3280 bp, Homo sapiens
ggaactggcagcggggaggaggctctagcgaggcctgaaaggctgcgtaaccaggcaggagtaggggttggggttcggggttgggggacagccagggatcgcgtctgatatgctgttggggtcgtgaccgtctgggggccgaggcaggcactggccagacccagccagggatcctcgtattcgtcgagcctaatttccagcagccgggtaggcctcaccagaggctcctttccgtgaggccgcccccaattcctgcccctattctctgcctgggagatggcttccccgagccccccgccggagtcgaagagagacttgataaatcggcctgagaaaataagtaatgctccagactagctctctcatttgtgagttctccaggtgaagcaccatttttgaccttcccttgtgtcttctgttcctggcacagtgcctggaccccaaggaggagtgggattatctggacccagctcagagaagcctgtataaagatgtcatgatggagaattatggaaacctggtctcactggatgttttgaacagagataaggatgaggagccaactgtaaaacaagagattgaagaaattgaggaagaagtggaaccacagggtgtaatagttacaagaatcaaaagtgaaattgaccaggatcctatgggtagagaaacatttgaacttgttggtaggttagataaacaaagagggatcttcctatgggaaataccaagggaatctttgacccaggaacagagaatgttcagagaaaacactaacattatccgtaaaagaccaaactcagaagagaaatgccataaatgtgaagaatgtggaaagggttttgtccgcaaggcccatttcattcaacatcaaagggtccatactggtgagaaaccttttcagtgcaatgaatgtgggaaaagttttagtcgcagttcatttgttattgaacatcagagaattcacactggggaaaggccctatgagtgtaattactgtggaaaaacctttagtgtgagctcaacccttattagacatcagagaatccacactggagaaagaccctatcagtgtaatcagtgtaaacagagcttcagccagagaaggagccttgttaaacatcaaaggattcatacaggtgagaaaccccataaatgtagtgactgtgggaaagccttcagttggaaatcacaccttattgagcatcaaagaactcacactggtgagaaaccttatcactgtaccaaatgtaagaagagctttagtcgaaattcattgcttgttgagcatcaaagaattcacactggggaaagaccccataaatgtggtgaatgtgggaaagcctttcgattaagcacataccttatacaacaccaaaaaattcacactggcgagaagccttttctttgtattgagtgtggaaaaagtttcagtcggagctcattccttattgaacatcagaggatccatactggtgaaagaccttatcagtgcaaagagtgtgggaaaagtttcagtcagctttgcaaccttactcgtcatcagagaattcacacaggagacaagccccataaatgtgaggaatgtggaaaagcctttagtagaagctcaggtcttattcagcatcagagaattcacaccagggagaagacttatccatacaatgaaactaaggaaagttttgatccaaattgcagtcttgttatacagcaggaagtctaccctaaggagaaatcttataaatgtgatgaatgtgggaaaacttttagtgttagtgctcatcttgtacaacatcaaagaatccacactggtgaaaagccctatctatgtactgtctgtgggaaaagcttcagccggagctcatttcttattgaacatcagagaatccacactggtgagagaccctatctgtgcagacagtgtggaaaaagctttagtcagctttgtaatcttattcgacatcagggtgttcacacaggtaataaaccccataaatgtgatgaatgtggaaaggcctttagccggaactcgggtcttattcagcatcagagaatacacacaggagagaaaccttataagtgtgagaagtgcgacaaaagtttcagtcaacagcgcagtcttgtcaaccatcagaagatccatgcagaggtgaaaacccaagaaacccatgaatgtgacgcttgtggtgaagcctttaattgccgtatttctcttattcagcatcagaaattgcacacagcatggatgcaataaatgtagagcaatacataagctcaatttgatttgagactagtacccaagtgcagttttagtatggctcaacatgggtcagatttagtgataaagcaaattctccttggcctcaggcaaatagtttctaaagattctgtgaatagtggacaactgcccatgagcatttgacttcccttactctttgatgatcgtagagaaagacttggtaatttatctaagtatctttaataaatctttcagcagagagattaaacctaggttcagagcatgggtgctctgagggacaaagttggattagtataagggagctggagcagctgatagtggaaaacagaataatgattcaaagagtcttctgtcaccatgtcatattgtggttctttcagttccatgatatgtttggctctgcatgccaaagtccagtgattaagcatatataagttgtcaaggaaacaaagcccaaatgtttttaaaacaagtatacagtttttgtcattgtttaagaaagccagttgtttggcatgtgagttaaaggcagttccaatgcctgatggttcccagatctatgaaatgagtggaccattaaccttacatgtaaagattatgttagtaattaagaaacctaacaaaggtgttaccaaggaacctttgggagtgccttttttgtttttcaagatggacccaaaaaagtggaggaagatattgttcttttgtgccctcctacctgtgagagatatttgtagtcctatgtgaatgagcttatccctccacaaccaggtgcatatgaaagtgtacatattatgactgccaagtattggaaatgaaaagacctggagtctatgctaggaagctgagatattttggtattgcattggtttttatggtaactaggttttgcatgcaattaaaaatccttatttcttgttctagggcttcccttagttaatggttattataaacctattaattcatctgttttaaccattaaaacctgttttgtttttagctttgaaaaaaaaaaaaaaaaaa

SEQ ID NO: 14905 - DNA, 3186 bp, Homo sapiens
ggaactggcagcggggaggaggctctagcgaggcctgaaaggctgcgtaaccaggcaggagtaggggttggggttcggggttgggggacagccagggatcgcgtctgatatgctgttggggtcgtgaccgtctgggggccgaggcaggcactggccagacccagccagggatcctcgtattcgtcgagcctaatttccagcagccgggtaggcctcaccagaggctcctttccgtgaggccgcccccaattcctgcccctattctctgcctgggagatggcttccccgagccccccgccggagtcgaaggggttgctgacatttgaggatgtggctgtgttttttacccaggaggagtgggattatctggacccagctcagagaagcctgtataaagatgtcatgatggagaattatggaaacctggtctcactggatgttttgaacagagataaggatgaggagccaactgtaaaacaagagattgaagaaattgaggaagaagtggaaccacagggtgtaatagttacaagaatcaaaagtgaaattgaccaggatcctatgggtagagaaacatttgaacttgttggtaggttagataaacaaagagggatcttcctatgggaaataccaagggaatctttgacccaggaacagagaatgttcagagaaaacactaacattatccgtaaaagaccaaactcagaagagaaatgccataaatgtgaagaatgtggaaagggttttgtccgcaaggcccatttcattcaacatcaaagggtccatactggtgagaaaccttttcagtgcaatgaatgtgggaaaagttttagtcgcagttcatttgttattgaacatcagagaattcacactggggaaaggccctatgagtgtaattactgtggaaaaacctttagtgtgagctcaacccttattagacatcagagaatccacactggagaaagaccctatcagtgtaatcagtgtaaacagagcttcagccagagaaggagccttgttaaacatcaaaggattcatacaggtgagaaaccccataaatgtagtgactgtgggaaagccttcagttggaaatcacaccttattgagcatcaaagaactcacactggtgagaaaccttatcactgtaccaaatgtaagaagagctttagtcgaaattcattgcttgttgagcatcaaagaattcacactggggaaagaccccataaatgtggtgaatgtgggaaagcctttcgattaagcacataccttatacaacaccaaaaaattcacactggcgagaagccttttctttgtattgagtgtggaaaaagtttcagtcggagctcattccttattgaacatcagaggatccatactggtgaaagaccttatcagtgcaaagagtgtgggaaaagtttcagtcagctttgcaaccttactcgtcatcagagaattcacacaggagacaagccccataaatgtgaggaatgtggaaaagcctttagtagaagctcaggtcttattcagcatcagagaattcacaccagggagaagacttatccatacaatgaaactaaggaaagttttgatccaaattgcagtcttgttatacagcaggaagtctaccctaaggagaaatcttataaatgtgatgaatgtgggaaaacttttagtgttagtgctcatcttgtacaacatcaaagaatccacactggtgaaaagccctatctatgtactgtctgtgggaaaagcttcagccggagctcatttcttattgaacatcagagaatccacactggtgagagaccctatctgtgcagacagtgtggaaaaagctttagtcagctttgtaatcttattcgacatcagggtgttcacacaggtaataaaccccataaatgtgatgaatgtggaaaggcctttagccggaactcgggtcttattcagcatcagagaatacacacaggagagaaaccttataagtgtgagaagtgcgacaaaagtttcagtcaacagcgcagtcttgtcaaccatcagaagatccatgcagaggtgaaaacccaagaaacccatgaatgtgacgcttgtggtgaagcctttaattgccgtatttctcttattcagcatcagaaattgcacacagcatggatgcaataaatgtagagcaatacataagctcaatttgatttgagactagtacccaagtgcagttttagtatggctcaacatgggtcagatttagtgataaagcaaattctccttggcctcaggcaaatagtttctaaagattctgtgaatagtggacaactgcccatgagcatttgacttcccttactctttgatgatcgtagagaaagacttggtaatttatctaagtatctttaataaatctttcagcagagagattaaacctaggttcagagcatgggtgctctgagggacaaagttggattagtataagggagctggagcagctgatagtggaaaacagaataatgattcaaagagtcttctgtcaccatgtcatattgtggttctttcagttccatgatatgtttggctctgcatgccaaagtccagtgattaagcatatataagttgtcaaggaaacaaagcccaaatgtttttaaaacaagtatacagtttttgtcattgtttaagaaagccagttgtttggcatgtgagttaaaggcagttccaatgcctgatggttcccagatctatgaaatgagtggaccattaaccttacatgtaaagattatgttagtaattaagaaacctaacaaaggtgttaccaaggaacctttgggagtgccttttttgtttttcaagatggacccaaaaaagtggaggaagatattgttcttttgtgccctcctacctgtgagagatatttgtagtcctatgtgaatgagcttatccctccacaaccaggtgcatatgaaagtgtacatattatgactgccaagtattggaaatgaaaagacctggagtctatgctaggaagctgagatattttggtattgcattggtttttatggtaactaggttttgcatgcaattaaaaatccttatttcttgttctagggcttcccttagttaatggttattataaacctattaattcatctgttttaaccattaaaacctgttttgtttttagctttgaaaaaaaaaaaaaaaaaa

SEQ ID NO: 14906 - DNA, 10891 bp, Homo sapiens
agccgctgagaggctctgcgtgtgcgtgtgcgcgggtgacgccgtgtgtgtgcgagtgtgtgtgtgtgtgtgcgcgcgcgcgtgtgagagagagaaagggagagagagagggggactctgtgtgagggaaagaaaacaatttctcctgctctgcagcttctgttcaggatcaatgtgactctaagaacaaatggatgaatgaatatccatatgaagagaaaaacaataaagaatatcaacacctttgagaacagaatgttaatgcttgatgggatgccggcagtcagagtcaaaacagagcttttggaatctgaacaagggtctccaaacgtccacaactatcccgatatggaagccgttcccctgttgctaaataatgtgaaaggggagcccccggaggactcgttatctgtagatcacttccaaacacaaactgagccagtggacttgtcaataaacaaagccaggacgtcccctactgccgtttcatcctccccagtttccatgacagcatctgcctcctcaccttcttcaacttcaacctcttcatcgtcttctagtcgtctagcctcatccccaactgttatcacatcagtatcttcagcgtcatcttcgtcaacagtattaactccagggccccttgtggcctctgcatctggtgttggaggccagcagtttttgcacattatccatcccgtaccgccttcaagtcccatgaatttacagtctaacaaactgagtcatgttcaccgcatccccgtggtggtacagtcggtgcctgttgtctacacagctgtaaggtcacctggaaatgtgaacaacactattgtcgtgccgcttttggaggatgggagaggccatggcaaagcacaaatggacccccgaggcctatctcccagacaaagtaaaagtgacagtgatgatgatgacctgccaaatgtgaccttagatagcgttaatgaaactggatctacggccctttccatagccagagcagtacaagaggtacatccgtccccagtatcaagggtccggggcaatcgaatgaataatcaaaagtttccttgttcaatttcaccatttagtattgagagcacaagacgccagagacggtctgaatccccagactccagaaaacggcgtatccacagatgtgattttgagggatgcaacaaagtgtacacaaaaagttctcacctgaaggctcaccggaggacacatacaggagagaaaccttacaagtgtacctgggaaggctgcacctggaagttcgctcgttcagatgaactgacgaggcattaccgcaaacatacgggagtgaagccattcaagtgcgcggactgtgatcgcagcttttcccggtcagatcatttggccctgcaccgccggaggcatatgttggtgtgaggaatgctacctgtccagctgagcgtaagagctggatctcttagcggcacccaattcagcagggctgaatccccttcacagtgttaacacaaaagggcatcaccatcccacgatgtctgaaaccagagcaggaaaaagaaggcacacttcttttggtctgaaggtaacccccatcatgactagacgagaaccgtctttacccggcctgggagctcagtgacataaatgctgaagagacaggcattgttttccgtgctgtgtcctctgccatttaaagatgtttgtagcttgtacattttctgagctgtcagacattttgttattgataccttaaaggtcacctaccacaaattgatggctagagcaagaccttttaaatttggatgaatctcccatcatcccatcccttaacccctttttacagaaattttagttacaatctgagtaagctagaacacacatccaatctgttaccagcaagcagcatgaaagtagaaacgaagaagcagatggagaggtcccattacctgcaaagaaagggcactcaggcagccctttgcaatcgcgatggcagccactagatatcactctcaacttgtcattctgccatgccctgaagaaaaccaacattgaatctttcatttgtttgtcgttgattgtttttgttttgtttcgattctgttttgttcatctgttcgagcagaggggcagttgaagtctcgtcctggtctctgccctggcatggactggcacagaggtgttctgtagttgaataggaagagcctgtctaaaaaactactgccccacttcaaattgcagtgttctgtcacctaggcatcatctcttcctgcccctagtatttgattacaaggaaccaggggaaaaaaactttcttagacacactggcaccaaggtaagaggtggggctgcccaggcaaagtcagtgaacatgaaaactcagacaaagcagagatggaaataatgcgcctcttgaggagaaaagcaataatgaataaaaggactttcctacaataacttcactgaggactcacgttaccaattttcatacttactaaagggattgtaaaaaacaccccagcattttaggtgtcttggttccatttacagcactgaggtaatctttctgctgtttgttgtcctgcttggttgagtaccacaattaaagattatgctccccttttcttgtttgaaaacagttatttggtgactagaaaggcaagggaggcatagccgggaattaactcttcggttaatgggtcagttctccttggaactgaatcagtggaaagagaatgcttcccatagaaagcccgacatggtgctagtttcctctcttggagagccaaggataagtgactctccaataggttcttctataccgatttcattttctaaactgtatcaggacccaggtgtcctgcattggcatctgcagggatattgaacccactcatcctgtgcagaggatgagaggaaggtgttagttccatcagccccataaaattatgaacctttttgcaactaggaacatatacagtaaacaagcaatacatcaccaacgagcattctttcagaaaaattaccatatttttgtccccaccacaagctgggtttttttccagctttctgtggctgaggggctggtgagattttttgttgttattgttgttgttgctagaattttttatagcttagatataaaaggtctccaacaaagacctttgcaatatattttaattacaaacacttgattttgggaattgcacatattaacctcacaatattactagctcatttttaaatgtctggacattctgaaataatttccggttacagaattaccctttttaggatcatcttctaattcagataatcttattctgatgaagcgagaactatgaacgttgaaacaaggacaatttgtgttggatggtattcaaaaggaattttttaaaacattaagcaacagtgtaatgattttcaggtcaaattatggcttcacaaatatgtgctctatattgtctgccaggtctcaaaaattcatcaagcaatttccctccaacaagggctgcagttctagtgataaatagcatctttagctgcacagtctactactcatcaaccagtgggttttttttagcacctggaaagtttttttgtactatatgcaactcctacttcacattgcctgtgaccattcagaatagaaaaaggtctgttgatgcatgccagtgctggttactagtcagtgacagagaacacagagagggacaaacacagccatgaaccccctggcactagtaccagcacctagttggcaagtagtgggtgcatctctcaagtgaagtgtagatttgtatttagtcctgcttgctctcataaaaagagccagttcttttctctgctgaaagatgtcttgagagtattacaggtagacttggtttttagaattcataaaactgacaggcaggggaatcttcctgagtgacagcttggtttaaatttagcacagaactagatgagttgcacttttctaataacataggatggatttggggaagggaacattttccctcatcctctgaaagtggaaaccagactgagatggtaagttaactgataaaacctgtcagcattccatcattttccccttttgacgtatcagtacttctaagaagggatctaagcacaattaagtgaattgagtccctggtctagcctcaggaactgaaacttctttggggcttgtcttgagacgtggcaaattctccttggtgagttttctaaaagtatttccccatggaaaggagaaagtggtttgggacagaaagaaatggaatgtcttcagtcatggaagagcctccatttcatctcatgtccatttctagcctctttcaaaaagcacagtgcatcatgagcaacagaaaagcagtagaatcctaaaggacataacagttgttccgtaactagaagcattctttgattttaaatttgaagctgttcagtttgcagctggggatatgtgcatggttgggaacttatacacatagagccattaactacttaagcagctgcagtagacctgattttctgtttgcagtatagagattgatttcaagggagttacattatttgaaaagttatgactttcagcctttgaggttttaagaatcccttttcatggtctgatcttaagttgtttgaaaaaagattcacgcttctgcatccacctctgccctcattctgtcaattgtgtgtggactctgagaagcctgcttgataacttgtcttaagttctattaaggcagttagactgagatttctaatgacttcaccataaagattatacttctgcctggcgtcgtttctataaaacactataggacatttgttttcaaaagcagttgagtaacagcaacataaaccacattttttaaaaaaatgagcacttttcattcacttgaaagcttaagtgggaaaaaggaagatgattgtcaggggaaaaacttacaaaatgctacagtgtttacaaatgccagttccaggtgattagaaaggccgttttcattatggttcagatttggaatagcttatgcaaagattgtgttcatttttatacaattctttttaactttaaattgccatctgtgttttaaacataattctgcactttggaatcagttcattagaatgataacatttatatggataaagatgcagtattccttattctgtacttgatttattatacttaccaaagctgcaactgaataaatctggtgaggtgaggccttcaaaatgtattaatacgcctttgttatgttgttatgactgcttagaaatgtagccatgatgttgttctaaagatgtcttaacatttatagtgaggattgacagaaattaagcagtgttaagaataccagcatccatgttacagtctgcgtataagggactgaatgtgaggtaactcttatgaatcataataggcccagaaagccttaatattcatagttcataatccagtctcagattttgctcttcaatgttgcctgtaaacttagcaggtaaatgtattctagtataaaacatcattgaccaaatctcttcctttagtttttctgaggtagtgcatcccattaaaaaagtctcttcaattagatttggctttagtttagaaaggggtttggtaagtcatgtcttccatatgacatttctactcatccccacactgccttccacttaacctgtacagacagccccaacacatgcacatgtgtgtacacaactgtatatgcagcagccagtgggctaacaaatatcagcaaagaacttttttaaaaagaatttgtaataatccgtgctgtctagaaatgtgagttacttaccttattaggaaaccggcttataatactatatatgactctgcctgcattttatagttaagaaatgtacataaaaattgctatattttcacagtttcattataatgtctgtttagtaacccatgtccactgatactttaaatatgctaattactgagcaattgcaatagaaatccagattttcataagaaaatgaaatagaaggatactgcatctttaaaaaatagagtgaagatattttactgtattcgtaacatatgtgatagtggaaaaagtattttcaaactcacaaattttacagaggttgtaaatagtttgatgaagtatgttgggaaagagagcttctagttttcatcacaataaaaagaaaaaacttgttcagatatgccttgtatatcttacacacaatgagtgaaattgccatgggaactctgtccaactttgtcagagcatgctcttcgtgttctgttcaaaatagagtggccacttgtcatggtttagccaggatggtttaaaatataatgaagtcattttaagttgcagacaactgattccaaactagtaatgtcttttcctgaaaagggcaaaacagctgcacaggattttgcttgtactaaagaggagcatcttacaattgttctcttttctcagttatctccctcctcaacagagtgtgaacaaccatacaggtgtttattcttgttttattccagggagactgcttttaggtataactacatgttgacaagattaagtgctgtggatatggccacgtgttaaaggaatctatactcgcaataggaataagctaatgcccattttcagaaataaattaaatgctgaaagtgcctgtcagtaaaccttatgaccaatgagatattcctatacttttacacagcaataattcttaataagactgggttttttcctgcacatgtgaacacacacacacatacacacagagagagtaaatacatacacatagtaaatcaaatctgttcacatgcccacaaaaaacgcttttatagctttcaaatatacctaatcttgtttacattaacatttcttaatttgatctttctaacttgcagaacgttaagaacacaaatctgaacattaagtttatcttcagtgaacactattgcatatggtaattataatttccagataaaaagttgactgtcatttgccccaaacttatgaaacagtatgtatgattcaaaaagttttgctcagttaaaaacaccaatttatttggcgcaaaagactgaaggatatttgtttgcttgttcattttatccactcatatcaaacgcacaaattcatctttacatttcttcattcccctttcccctaatatttcctattatcatcttaagaatcattttggaatgaatattgacagaatcatttctccccaaaaagtctgttgaagtaccactgacacttagtaagcctagcctttaaccatctttgcagttagtcctaaaaattaccagatgcacattcagaagctcacaggttttttcctgtaattactgtactgctaaaagtggagtcatggatagaaatatacaatgagactatatgaatagacatgaaccctggaaattctccaaccctgccatctcagagcacaaattcacccaaacaagctactgaggctatcagtaaaattatactcatggagagtcacacatcgggtaagggcaattttaaaagtaggactgtgattaaacattcaggctttagacttccatgatggactcagaccacaggcctcaaaaaaacatccactgttttctcctcccaatgttagaaagaagaaaagggagacggaaatgtaccaggataagggggtaaaataaccaattaagtgtcaaaggaaagctgctgggttccttaatctcactgaagtcaagtcttctgactgggcttcttaccatgtgttgtctgaaaaaactaaagtaccttgaaaggttacacattcagcaaaccatgaagataatagctattctttattaaacactgtgtgccaagcaatagactaggcaatttttagatacgttacctgcaacctgtacaacatttctacactttatggatgggaaacggagacatgggaagtgtggctgagttgttcatggatgtagaaatagtaaacggcagagtaggaaagtgaaaccgcctatctctgacctggaggtctgcctgtatctttcccactccaccacactgcacgtgggtgtcccgaaaccaccttcccagattcctgactctcagtaattttattatggacaacatgcatgagtagtcatcatatttttcaagtgaaatatcgggacatgatataacacatgacttaacaatggtactgaatatttgaaatcaggcctttcccggaaaatcatgcatgaaggatcattataaacaaacaatagcaaccagttgtctccccgaacttgtcacttttctcataaatgtctggcctggagctccaaaatcatccaaatacttagtagcattttagcctgagtacactttctcagttcctcaactctttgtatacctttccaccaatatagacattctagaatctgcttcagatgcatttgaaattttcacccccatggaactagtgattaatatcagagcccactcttgcagttggtaatggggtggcaatcaaacgttcagatgatgataaaggagagataatggataattctttttcagagttctcacttaacagctctgttgtggaatgttttaaatagtcttataaataatttgtttatagtattgttgttagtttaattgaattttatgtaagaagctgtccaacatcagagaaatgaaattcctcccactttctgtgtagaacaaggtctctgacagtattgattcatggaagtactaatggacttagaaaacattaagagaatgtcatttctcatagtgtttctgtttctgaaaatgaatctcctgaattattatctttctccctgttacttggctggggaaagagatagaagctgtataaacaaattctcttccatgctcaaagcaagtgttccatgtgcacaacctgctgcagactggggcccttctcagttaattgggtttcacaagcaataatttctccacaacaaaaaccacaacttgaagtgagttgaaaagagatcaatagtggaaacagtcgcctcagtactttttctttctggatttcatctctagaaatttgaagtgtttgagacagagtccaccctttgtgcaaggcgagaaccaatgaatggactccttgtgtgaattattgcatcttcttccaaagcaggttcatcaagactttcacagagattcatttttgttgagaagtaagggttaataggaggatagaatttggatccaaatctagtgataaaagtgtccaagcaatcaaaaagtaagatattttagggacataccaacatcttccctttctgctaatttcatgctccaaagatatggcaaaaaaaaaaatcataaaaagtgcttttgccctacttgtgttctagttttcccatggcagaattttgtaattacatccagaatatagtgtatattttgttcctcaaactttattacattggatggatattgttgaactggggcactggtgcctatattcaaggctctttcctatcaacgtgtctgtccacgatttgttgtgtttaaagcttcattttgaaaaatcactgtccccctgtggggtagtgactgtattgttttgttcatgtctatgtgggacacattgcatcacatggcaaaccaactctctgtggatgtgagataagtacttataaaaccagcttgaaaacatcgtcttatgtattatgtcatcctgcatcataatgcaattatgtgtatcataacatgctcatttaaaaaaagagaaaccagcaaattcatgtttgtccatagaagaatgtactcagaactttgtgttgtgaaacgatgagaacagaccacctttaagatacccacctgccacttaaaatgacttagttataattagtagtagtctagacgttgttcttggtgtgtgggggtcaattctaacgtcatgttcttttgaataaatctctcagtcatatttgaaaaaaaaatacatgggaataaagaaaaatatcatctttggccaaatcaagcaggcatcttttttcttttccttgacgtttagctcattatacgtggtgattggatcacgagatctgtccgtgtgaaaatacagaaacatcctttagtttacaaaacagttattctaggcttgaagcctctgaacagcaaattgaatagatgggctgcatctgatttgctttatggatgtaattttacaaaacactcttgggtctctgaccccagggagttaagagtgcccagaggaggtcctacacattaaaggataaagccccccagtgatgctggcaagcaaatgtgttgagttcttaaatcttcatttggttttctgttcaggattttaattgcaaatgaatttatttctccagtttatctaaagacctaatttcccaatagtttcctctgcatttatatactctgtagtgtttaggcaaccctgttataagtttattaatattatgtaagtgttgttcttgtatttatgtatagtgtatgtattgtaaatatactcagagcttttttccttttactgtaaaatggtgatttttttgccctatgataatgtaaagggagaccctcctaatgagattctctcagaggatgattattccagtctattctcagagatttaaatgaacaagtgttattgtttttaatggtgtctcagacatattctgttggtgcattgcttttctgtattcaactttcctatgaattgagctgtgaactgaaatagagtttaaacctttaactgtatgcatttgtataattatctgaatgaaggcatgaaggttaaataaagcattttgtatggaacaaaaaacaaaactccctaactgactcagacactttggaaatcatagttattaaccattctaattaaacctttgttatgaaaagtttta

SEQ ID NO: 14907 - DNA, 1817 bp, Homo sapiens
aaaaatcagaataagaagtacctgacatactttctacatctgtagttgcggaagacattttaataggtcttctcatagcctttctttgctaaggacattgtgactctccagagagcaacagtgatggctctagaatgtctaggaaaaagaagggcttaatgtcaggagtctgcttggggcacacaacactagaagatgtccttctgcacattgtttcatatcgagtatggaacccttcagatcaaagcttaccaataaattcagtatgtagaacagattaacgtagttgaaatgaggaagaatgagagttatctcaaccagccagcaccccctatccccattcccacactttccctcatgggaggctgtcgggagcacttcgaaaaccactggaaaggccgggcacggtggctcatgcctgtaatcccagcactttgggaggccaaggcaggcagatcacctgaggtcaggagttcgaaaccagcctggccaacatggcgaaaccccatctttactaaaaatacgaaaattagccaggtattagaattatttctgaattatcagtctctcatttgtgctttggagaagcagaaaaggcaaaaggggtctttggccatcttctgctggagcttccagggaggatgtgtctccaagagaccagatgtaccgagtttgaaatcccagaagcccaagaggaaaagaatcacagggaggaaaagactgtccaaaggcttctggagtcttctgttctctaaccttggaaggttttgaacaatatttctcagaggatagcctttcacttattcatctgtccagcatgactcatccccgggagtgttgagtaagtgaaattttgctgtattcatgtttttgtgacttataaaataggatgataaggagagaacatgaactctggagtcagacctgttacctcggacatgatactcttagctttgtcatttagtatttgagtaattttgggcaagctaacatctctggtcgttctcatctgtaaaatgagaataaatgaaacccactaaccagaattggtatgaaaatgaaatgtggcagaaaaaaaatgaaagtgaatagtatcaccactgacacacaagcactaaaggcccttcctgtctccatcaggtatggatttggggcaacatttggccagatcttgtttatctttctgttcatctattctgtctaattcagtgctttgtttacaacgaatgtcttacaaatgctgactgaacactagcatacctgcatgaacaacaggtaaataaattttagatgtgttttaatgtttattaatctatcctgtcagagaagaactgccagttatagataaatatgatgccaggtcagggctgaagagttgggcaggttgttatctgcatggggtcactaggttccagtggagaggtgggggctaagctctcacccgctctgcagccacctggcacccggtttcagtttcctgaaagggagccttctacttgctgacgactgcctcatctcttctgaggtttcctctgataaacaattttctctgctttttttttttaattatgaaatacttaaaatgtaaaggagataatgtgacacacatttacccataattgagattgccataattgctataactttttcaaaattttgacttaatttcagacttttagaaaaattggccaggtgtgatggctcatgcctgtaatcccagcactttgggaggccaaggtgggtaaattacttgaacccagcagttcgagacttgcctgggcggcatagtgagaccttgtctctactgaaaacaaact

SEQ ID NO: 14908 - DNA, 2798 bp, Homo sapiens
ctctccctccccagtagacgctcgggcaccagccgcggcaaggatggagctgggttgctggacgcagttggggctcacttttcttcagctccttctcatctcgtccttgccaagagagtacacagtcattaatgaagcctgccctggagcagagtggaatatcatgtgtcgggagtgctgtgaatatgatcagattgagtgcgtctgccccggaaagagggaagtcgtgggttataccatcccttgctgcaggaatgaggagaatgagtgtgactcctgcctgatccacccaggttgtaccatctttgaaaactgcaagagctgccgaaatggctcatgggggggtaccttggatgacttctatgtgaaggggttctactgtgcagagtgccgagcaggctggtacggaggagactgcatgcgatgtggccaggttctgcgagccccaaagggtcagattttgttggaaagctatcccctaaatgctcactgtgaatggaccattcatgctaaacctgggtttgtcatccaactaagatttgtcatgttgagcctggagtttgactacatgtgccagtatgactatgttgaggttcgtgatggagacaaccgcgatggccagatcatcaagcgtgtctgtggcaacgagcggccagctcctatccagagcataggatcctcactccacgtcctcttccactccgatggctccaagaattttgacggtttccatgccatttatgaggagatcacagcatgctcctcatccccttgtttccatgacggcacgtgcgtccttgacaaggctggatcttacaagtgtgcctgcttggcaggctatactgggcagcgctgtgaaaatcttctggaggctgggaagtccaagatcaaggcgtcagaagattcattgtctgtccttgaagaaagaaactgctcagaccctgggggcccagtcaatgggtaccagaaaataacagggggccctgggcttatcaacggacgccatgctaaaattggcaccgtggtgtctttcttttgtaacaactcctatgttcttagtggcaatgagaaaagaacttgccagcagaatggagagtggtcagggaaacagcccatctgcataaaagcctgccgagaaccaaagatttcagacctggtgagaaggagagttcttccgatgcaggttcagtcaagggagacaccattacaccagctatactcagcggccttcagcaagcagaaactgcagagtgcccctaccaagaagccagcccttccctttggagatctgcccatgggataccaacatctgcatacccagctccagtatgagtgcatctcacccttctaccgccgcctgggcagcagcaggaggacatgtctgaggactgggaagtggagtgggcgggcaccatcctgcatccctatctgcgggaaaattgagaacatcactgctccaaagacccaagggttgcgctggccgtggcaggcagccatctacaggaggaccagcggggtgcatgacggcagcctacacaagggagcgtggttcctagtctgcagcggtgccctggtgaatgagcgcactgtggtggtggctgcccactgtgttactgacctggggaaggtcaccatgatcaagacagcagacctgaaagttgttttggggaaattctaccgggatgatgaccgggatgagaagaccatccagagcctacagatttctgctatcattctgcatcccaactatgaccccatcctgcttgatgctgacatcgccatcctgaagctcctagacaaggcccgtatcagcacccgagtccagcccatctgcctcgctgccagtcgggatctcagcacttccttccaggagtcccacatcactgtggctggctggaatgtcctggcagacgtgaggagccctggcttcaagaacgacacactgcgctctggggtggtcagtgtggtggactcgctgctgtgtgaggagcagcatgaggaccatggcatcccagtgagtgtcactgataacatgttctgtgccagctgggaacccactgccccttctgatatctgcactgcagagacaggaggcatcgcggctgtgtccttcccgggacgagcatctcctgagccacgctggcatctgatgggactggtcagctggagctatgataaaacatgcagccacaggctctccactgccttcaccaaggtgctgccttttaaagactggattgaaagaaatatgaaatgaaccatgctcatgcactccttgagaagtgtttctgtatatccgtctgtacgtgtgtcattgcgtgaagcagtgtgggcctgaagtgtgatttggcctgtgaacttggctgtgccagggcttctgacttcagggacaaaactcagtgaagggtgagtagacctccattgctggtaggctgatgccgcgtccactactaggacagccaattggaagatgccagggcttgcaagaagtaagtttcttcaaagaagaccatatacaaaacctctccactccactgacctggtggtcttccccaactttcagttatacgaatgccatcagcttgaccagggaagatctgggcttcatgaggccccttttgaggctctcaagttctagagagctgcctgtgggacagcccagggcagcagagctgggatgtggtgcatgcctttgtgtacatggccacagtacagtctggtccttttccttccccatctcttgtacacattttaataaaataagggttggcttctgaactacaaaaaaaaaaaaaaaa

SEQ ID NO: 14909 - DNA, 3905 bp, Homo sapiens
gccggagagctgatctcggggattcgggtgcggagcccttggcctggaggcgatatgggtggtccgtggcccggttcagtcgcttgcagcagcccggggaacaggcctgtctggccctgagggagtcccctttctgaagctgtggtgcttggacgacctgctctctacattgctgggcacctgtaggtgtccctcgagagctcagttttgaggttcaagtcagtgtggccatgaaggggctgcctattgggctgatgctgtgaccctggagtctgcctctcctgccagtccccctgcccggaacatgtggctgcggcttggcccgccctcgctgtccctgagccccaagcccacggttggcaggagcctgtgcctcaccctgtggttcctcagtttggcgctgagggccagtacccaggccccagcacccacagtcaacactcactttgggaagctaaggggtgcccgagtaccactgcccagtgagatcctggggcctgtggaccaatacctgggggtgccctacgcagctcccccgatcggcgagaaacgtttcctgccccctgaaccacccccatcctggtcgggcatccggaacgccacacactttcccccagtgtgcccccagaacatccacacagctgtgcccgaagtcatgctgccggtctggttcactgccaacttggatatcgtcgctacttacatccaggagcccaacgaagactgtctctacctgaacgtctatgtgccgacggaggatggatccggcgctaagaaacagggcgaggacttagcggataatgacggggatgaagatgaagacatccgggacagtggtgctaaacccgtcatggtctacatccacggaggctcttacatggaagggacaggcaacatgattgatggcagcatcctcgccagttatggcaatgtcatcgtcatcaccctcaactatcgggttggagtgctaggtttcctgagtactggagatcaggctgccaagggcaactatgggctccttgaccagatccaggccctccgctgggtgagcgagaatattgccttcttcgggggagacccccgccggatcactgtctttggctcgggcattggtgcatcctgcgtcagcctcctcacgttgtcacatcactcagagggacttttccagagagccatcatccaaagtggctctgctctgtccagctgggctgtgaactaccaaccagtgaagtacaccagcctgctggcagacaaagtgggctgtaatgtgctggacaccgtggatatggtggactgtcttcggcaaaagagtgccaaggagctggtagagcaggacatccagccagcccgctaccacgtggcctttggccctgtgattgatggtgatgtcattcctgatgaccctgagatcctcatggagcagggcgagttcctcaactatgacatcatgctaggtgtcaaccagggcgagggtctcaagtttgtggaaggggtggtggaccctgaggatggtgtctctggcactgactttgactattccgtctccaattttgtggacaatctgtatggctatcctgagggtaaggacaccctgcgagagaccatcaagttcatgtatacagactgggcagaccgtgacaaccctgagacccgccgtaaaacactggtggcactcttcactgaccaccagtgggtggagccctcagtggtgacagccgatctgcatgcccgctacggctcgcctacctacttctacgccttctatcatcactgccagagcctcatgaagcctgcttggtcagatgcagctcatggggatgaagtaccctatgtttttggggttcctatggtaggccccactgaccttttcccctgcaacttctccaagaatgatgttatgctcagtgctgtcgtcatgacctattggaccaactttgccaagactggggatcccaacaagccggtcccccaggacaccaagttcattcacaccaaggccaaccgctttgaggaagtggcctggtccaaatacaatccccgagaccagctctaccttcacatcgggctgaaaccaagggtccgagatcattaccgggccactaaggtggccttttggaaacatctggtgccccacctatacaacctgcatgacatgttccactatacgtccaccaccaccaaagtgccgcctccggataccacccacagctcccacatcacccgcaggcccaatggcaagacctggagcaccaagcggccagccatctcacctgcctacagcaacgagaatgcccaggggtcctggaacggggaccaggatgcagggccactcctggtggagaaccctcgtgactactccactgaattaagtgtcaccatcgccgtgggggcctccctcctgttccttaacgttctggccttcgctgccctctactaccgtaaggacaaacggcgccaggagcccctgcggcagcctagccctcagcggggagccggggccccggagttgggagctgctccagaggaggagctggcagcattacaactgggccccacccaccacgagtgtgaggccggtcccccccatgacacgctgcgcctcactgcattgcccgactacaccctgaccctgcggcgctccccggatgacatcccactcatgacccccaacaccatcactatgatccccaactccctggtagggctgcagacattgcacccctataacacctttgccgcagggttcaacagtaccgggctgccccactcacactccactacccgggtatagctccaactcagagcacagccaatctccaggctccctccctcccagatccaggaacacatgcacacacacacacacacacacgcagacacacacacacacacacatatatgtatacgcacgcacccacaccctacagcagatccacctgcacaaacatagacagatgtggacatgcacccgcatgtacaaaaacacaaatacggaagtaaacctgaacaaaccctttaaatggggacgcagatgagtcctcggtaaaccgaggacccatgaaacagcagctgaagccagctccctgaatctgaccacagacactcctggggggcctgaaagcaacagctggacacccccttggtgctcgccttcggcctctcttggaactgcaccaccgaccaactccagacttgggagctttaaagagcaggatagctcttcctccccaggacttggtcttttttctgggtcttgttttgttgatttttcttttttaattttggaacaaatgcttttccaacccatgagtgctaagagcctctggaagggagggcttcaggcccgaaggtctctctggctctaggacccccagtgctcacacaatcagaccaaggaacaagacccccaggaaggaaacagatttaagcaagaccatggggtggaaggagaaaggggctagcactggatggagctggagggtcgtaggggagagatctccaactctctctgtgtccgtgtggagggctgcagagcctgcagggtgacctgcttccccaaaggccaacagcattggcctggccagaccaggtgaccttagatttggtgaacaacgtactatggaagccacatcactattgggcccccaggtctgatctgggttttgcctctgcccttggggaaatgctatcagaaattcgccccattttctttacagtcttttgtgtctgtcatttctctttcaaaaaggcggtgttttttgttgttgttggtttttttttttttttaaagaaaagttcttaaaacactaacggaaacccatggagtttgtcctttgtaaaaattttaaacacagtgtcttgatataaaaataaaaaatccagttagcactcccaaaaaaaaaaaa

SEQ ID NO: 14910 - DNA, 5094 bp, Homo sapiens
atgcgcctgactcacatctgctgctgctgcctcctttaccagctggggttcctgtcgaatgggatcgtttcagagctgcagttcgcccccgaccgcgaggagtgggaagtcgtgtttcctgcgctctggcgccgggagccggtggacccggctggcggcagcgggggcagcgcggacccgggctgggtgcgcggcgttgggggcggcggaagcgcccgggcgcaggctgccggcagctcacgcgaggtgcgctctgtggctccggtgcctttggaggagcccgtggagggccgatcagagtcccggctccggcccccgccgccgtcggagggtgaggaggacgaggagctcgagtcgcaggagctgccgcggggatccagcggggctgccgccttgtccccgggcgccccggcctcgtggcagccgccgcctcccccgcagccgcccccgtccccgcccccggcccagcatgccgagccggatggcgacgaagtgttgctgcggatcccggccttctctcgggacctgtacctgctgctccggagagacggccgcttcctggcgccgcgcttcgcagtggaacagcggccaaatcccggccccggccccacgggggcagcatccgccccgcaacctcccgcgccaccagacgcaggctgcttctacaccggagctgtgctgcggcaccctggctcgctggcttctttcagcacctgtggaggtggcctgatgggatttatacagctcaatgaggacttcatatttattgagccactcaatgatacaatggccataacaggtcacccacaccgtgtatataggcagaaaaggtccatggaggaaaaggtcacagagaagtcagctcttcacagtcattactgtggtatcatttcagataaaggaagacctaggtctagaaaaatagcagaaagtggaagagggaaacgatattcatacaaattacctcaagaatacaacatagagactgtagtggttgcagacccagcaatggtttcctatcatggagcagatgcagccaggagattcattctaaccatcttaaatatggtatttaaccttttccaacacaagagtctgggtgtgcaggtcaatcttcgtgtgataaagcttattctgctccatgaaactccaccagaactatatattgggcatcatggagaaaaaatgctagagagtttttgtaagtggcaacatgaagaatttggcaaaaagaatgatatacatttagagatgtcaacaaactggggggaagacatgacttcagtggatgcagctatacttataacaaggaaagatttctgtgtgcacaaagatgaaccatgtgatactgttggtatagcttacttgagtggaatgtgtagtgaaaagagaaaatgtattattgctgaagacaatggcttgaatcttgcttttacaattgctcatgaaatgggtcacaacatgggcattaaccatgacaatgaccacccatcgtgtgctgatggtcttcatatcatgtctggtgaatggattaaaggacagaatcttggtgacgtttcatggtctcgatgtagcaaggaagatttggaaagatttctcaggtcaaaggccagtaactgcttgctacaaacaaatccgcagagtgtcaattctgtgatggttccctccaagctgccagggatgacatacactgctgatgaacaatgccagatcctttttgggccattggcttctttttgtcaggagatgcagcatgttatttgcacaggattatggtgcaaggtagaaggtgagaaagaatgcagaaccaagctagacccaccaatggatggaactgactgtgaccttggtaagtggtgtaaggctggagaatgtaccagcaggacctcagcacctgaacatctggccggagagtggagcctgtggagtccttgtagccgaacctgcagtgctgggatcagcagtcgagagcgcaaatgtcctgggctagattctgaagcaagggattgtaatggtcccagaaaacaatacagaatatgtgagaatccaccttgtcctgcaggtttgcctggattcagagactggcaatgtcaggcttatagtgttagaacttcctccccaaagcatatacttcagtggcaagctgtcctggatgaagaaaaaccatgtgccttgttttgctctcctgttggaaaagaacagcctattcttctatcagaaaaagtgatggatggaacttcttgtggctatcagggattagatatctgtgcaaatggcaggtgccagaaagttggctgtgatggtttattagggtctcttgcaagagaagatcattgtggtgtatgcaatggcaatggaaaatcatgcaagatcattaaaggggattttaatcacaccagaggagcaggttatgtagaagtgctggtgatacctgctggagcaagaagaatcaaagttgtggaggaaaagccggcacatagctatttagctctccgagatgctggcaaacagtctattaatagtgactggaagattgaacactctggagccttcaatttggctggaactaccgttcattatgtaagacgaggcctctgggagaagatctctgccaaaggtcctactacagcacctttacatcttctggtgctcctgtttcaggatcagaattatggtcttcactatgaatacactatcccatcagaccctcttccagaaaaccagagctctaaagcacctgagcccctcttcatgtggacacacacaagctgggaagattgcgatgccacttgtggaggaggagaaaggaagacaacagtgtcctgcacaaaaatcatgagcaaaaatatcagcattgtggacaatgagaaatgcaaatacttaaccaagccagagccacagattcgaaagtgcaatgagcaaccatgtcaaacaaggtggatgatgacagaatggaccccttgttcacgaacttgtggaaaaggaatgcagagcagacaagtggcctgtacccaacaactgagcaatggaacactgattagagcccgagagagggactgcattgggcccaagcccgcctctgcccagcgctgtgagggccaggactgcatgaccgtgtgggaggcgggagtgtggtctgagtgttcagtcaagtgtggcaaaggcatacgtcatcggaccgttagatgtaccaacccaagaaagaagtgtgtcctctctaccagacccagggaggctgaagactgtgaggattattcaaaatgctatgtgtggcgaatgggtgactggtctaagtgctcaattacctgtggcaaaggaatgcagtcccgtgtaatccaatgcatgcataagatcacaggaagacatggaaatgaatgtttttcctcagaaaaacctgcagcatacaggccatgccatcttcaaccctgcaatgagaaaattaatgtaaataccataacatcacccagactggctgctctgactttcaagtgcctgggagatcagtggccagtgtactgccgagtgatacgtgaaaagaacctatgtcaggacatgcggtggtatcagcgctgctgtgaaacatgcagggacttctatgcccaaaagctgcagcagaagagttgacctctagcaggctggctggatcacagctcttggcaattacattatttataaacacacacactagcatgtttttcagaccaaatattatcagattacatataatttaatcaaattaatttatttttttgcctgccaaacatccaatgtggtgcttgttttggttacacaaacattttgatttatactatatggcttcataaataattttatatgaatgaattagttggatccagtaatataataaaaagaaaaaggaaaaaaatagatcattatacttaaaacaagttttcgttgtttgttagggctatctctaaggtgctactctctccccaccaataacattgaattatccagaatgtatactgacttagcataatagtttaggtgtatatgaagagaaactatttttgttttttggtgtcctgctgcagaattagcccattttctgtcacctgcaggagatgtgtaaacataatgaacctcatgctgttgaacaggtttttagagaatgtattatgaatttggttcagatttatagacatccataggaaaaattctgctgtaattataaccttattttgatatggaaaagaaaagtcaaaatagagactttgatcatgttcatgaacatgtacttgaacacaagtattgtaacaatgaaacactgtaatgatttacactgaatcacaattgcactgttgatatagtgtagagaaatcgttagaaatggtgacatcttacaaaaaatgtgtattattttaacatgttatcactagattttagctttttttaaatatttttaacaaagaaaacattgatccacccatttccctgtatctttttagcagatttattaaagagtatagtacttagcctcacgaatcataattagaaaatttactagtatttctcagccttttccctaggaacaaggaaaaacagaaagcatataatacggtggtcgtttcattgtgtttttcttccttttaaaaattaaaaagttttacaattatgtgaaacgttcaaaagccagcttaaaatttttcttgtgagaaaatattatacatgattcacatgatttcttagatttttcaataaaatatgtaaaacttcccactgagagacaattcttcatagacttgtcacatatccacatgtctgatgaacaaaggtactgtctacttttgttctggagtatcttctagaggatgtttatagagtgaactgccttggaagatagtatgtctcttgggagcaaagggcaaacatacttctcattataaaagtttcaggttccctaaaattggggtttctttactataagacaatccaatgtatgttctgaggtcacctggctctcttcatgtcaccctttgggaaatggggctcaacgagccagtacaggaaaagctgattccctggctactactatcgctgtgagtaataaagtcctttgtctttaatgaaaaa

SEQ ID NO: 14911 - DNA, 5337 bp, Homo sapiens
gccccccctccccgcggcgccgcatcttgaatggaaacatggcggtgccggctcggacctgcggcgcctctcggcccggcccagcgcggactgcgcgcccctggcccggctgcggcccccaccctggccccggcacccggcgcccgacgtccgggcccccgcgcccgctgtggctgctgctgccgcttctaccgctgctcgccgcccccggcgcctctgcctacagcttcccccagcagcacacgatgcagcactgggcccggcgtctggagcaggaggtcgacggcgtgatgcggatttttggaggcgtccagcagctccgtgagatttacaaggacaaccggaacctgttcgaggtacaggagaatgagcctcagaagttggtggagaaggtggcaggggacattgagagccttctggacaggaaggtgcaggccctgaagagactggctgatgctgcagagaacttccagaaagcacaccgctggcaggacaacatcaaggaggaagacatcgtgtactatgacgccaaggctgacgctgagctggacgaccctgagagtgaggatgtggaaagggggtctaaggccagcaccctaaggctggacttcatcgaggacccaaacttcaagaacaaggtcaactattcatacgcggctgtacagatccctacggacatctacaaaggctccactgtcatcctcaatgagctcaactggacagaggccctggagaatgtgttcatggaaaaccgcagacaagaccccacactgctgtggcaggtcttcggcagcgccacaggagtcactcgctactacccggccaccccgtggcgagcccccaagaagatcgacctgtacgatgtccgaaggagaccctggtatatccagggggcctcgtcacccaaagacatggtcatcatcgtggatgtgagtggcagtgtgagcggcctgaccctgaagctgatgaagacatctgtctgcgagatgctggacacgctgtctgatgatgactatgtgaatgtggcctcgttcaacgagaaggcacagcctgtgtcatgcttcacacacctggtgcaggccaatgtgcgcaacaagaaggtgttcaaggaagctgtgcagggcatggtggccaagggcaccacaggctacaaggccggctttgagtatgcctttgaccagctgcagaactccaacatcactcgggccaactgcaacaagatgatcatgatgttcacggatggtggtgaggaccgcgtgcaggacgtctttgagaagtacaattggccaaaccggacggtgcgcgtgtttactttctccgtggggcagcataactatgacgtcacaccgctgcagtggatggcctgtgccaacaaaggctactattttgagatcccttccatcggagccatccgcatcaacacacaggaatatctagatgtgttgggcaggcccatggtgctggcaggcaaggaggccaagcaggtgcagtggaccaacgtgtatgaggatgcactgggactggggttggtggtaacagggaccctccctgttttcaacctgacacaggatggccctggggaaaagaagaaccagctgatcctgggcgtgatgggcattgacgtggctctgaatgacatcaagaggctgacccccaactacacgcttggagccaacggctatgtgtttgccattgacctgaacggctacgtgttgctgcaccccaatctcaagccccagaccaccaacttccgggagcctgtgactctggacttcctggatgcggagctagaggatgagaacaaggaagagatccgtcggagcatgattgatggcaacaagggccacaagcagatcagaacgttggtcaagtccctggatgagaggtacatagatgaggtgacacggaactacacctgggtgcctataaggagcactaactacagcctggggctggtgctcccaccctacagcaccttctacctccaagccaatctcagtgaccagatcctgcaggtcaagtattttgagttcctgctccccagcagctttgagtctgaaggacacgttttcattgctcccagagagtactgcaaggacctgaatgcctcagacaacaacaccgagttcctgaaaaactttattgagctcatggagaaagtgactccagactccaagcagtgcaacaacttccttctgcacaacctgatcttggacacgggcatcacgcagcagctggtagagcgtgtgtggagggaccaggatctcaacacgtacagcctactggccgtgttcgctgccacagacggtggcatcacccgagtcttccccaacaaggcagctgaggactggacagagaaccctgagcccttcaatgccagcttctaccgccgcagcctggataaccacggttatgtcttcaagcccccacaccaggatgccctgttaaggccgctggagctggagaatgacactgtgggcatcctcgtcagcacagctgtggagctcagcctaggcaggcgcacactgaggccagcagtggtgggcgtcaagctggacctagaggcttgggctgagaagttcaaggtgctagccagcaaccgtacccaccaagaccagcctcagaagtgcggccccaacagccactgtgagatggactgcgaggttaacaatgaggacttactctgtgtcctcattgatgatggaggattcctggtgctgtcaaaccagaaccatcagtgggaccaggtgggcaggttcttcagtgaggtggatgccaacctgatgctggcactctacaataactccttctacacccgcaaggagtcctatgactatcaggcagcctgtgcccctcagccccctggcaacctgggtgctgcaccccggggtgtctttgtgcccaccgttgcagatttccttaacctggcctggtggacctctgctgccgcctggtccctgttccagcagcttctctacggcctcatctaccacagctggttccaagcagaccccgcggaggccgaggggagccccgagacgcgcgagagcagctgcgtcatgaaacagacccagtactacttcggctcggtaaacgcctcctacaacgccatcatcgactgcggaaactgctccaggctgttccacgcgcagagactgaccaacaccaatcttctctttgtggtggccgagaagccgctgtgcagccagtgcgaggctggccggctgctgcagaaggagacgcactcggacggcccggagcagtgtgagctagtgcagagaccgcgataccggagaggcccgcacatctgcttcgactacaacgcgacagaagatacctcagactgtggccgcggggcctccttcccgccgtcgctgggcgtcctggtctccctgcaactgctgctcctcctgggcctgccgccccggccgcagcctcaagtcctcgtccacgcctctcgccgcctctgagcaccctgccccaccccacctccactcccacctcacccggcctcttcgcctttcccaccctcctgccccacactccccgccttagagcctcgtccctccctcactgaaggacctgagctggccaggccctgagagtctggtctgcgccttgggatggggagtcccaaagcgggacgccgcaggtgtttggcacccaaatcacatctcacctccgaactgttcaagtgtccccagacccttcttgcctgctgggctccccccagtgggatgggacagggaggccacacgcactggtgccaaaaccaggcctctgctgccgcccttcctggaggctgcctatgttgggggggaccctgcctcagctgacccggcctctctgccccacccaagcccaaacttggtttctgtgagaatagtggaggaaggtgagatggccagtttgaagcctgtgcctcccagcttaaatcctagcaggagagaggctctggggcagcccccatgggctcctgcccctttcaggcctacagccacatccccaagcccaccaggtgtcaggatagtcacagtgataccagttcagacactaccccatatacacctggaacattgaggatggaaactggactcacattcgacataccccactgggcacacgcacaaacacacacactatggggtggggtgggtgtaggggcttacaaagccttacacagggcgaggggttggtgggagggttggcacctgcacactccatctcctgctcaccacctgcctctaatctgagctgcagcctggctggtcctcccatttctaaagctgaatgtcaaacagtgccaaatgctggggcagggggtgaagaaccctctgtcccacccctagccaccagtgtcctccaagtgccccctcacctctccaggtgctcattgtaaccatttctcactagtgtcaggcccccagtgggaccacatgccactgcctgcacctttcggcagaggaacccccaccagacatcaccctttgccttagcaggggtgactttgtctctcctggctgggccatccttccgccaatctggcccttacacactcaggcctgtgcccactccctatctccttcccacccctacacacacactccctgcttgcaggaggccaaactgtccctcccttgctgaacacacacacacacacacacacacaggtggggactgggcacagctcttcacaccattcattctggtcatttcccccaaaggcatcccagcctgggggccagtggggaactgagggcaaggggatatagtgatggggctcagatggactgggaggagggggagggtgatgcattaattaatggcttcgttaattaatgtcatgttgcttgtcgctttctcagtgtgtgtgtgtggtccatgcccactgctggtgccagggtgggtgtccatgtgcacccggcctggatgccagctgtgtccttcgggggcgtgcgtgtaactgtagtgtagtcaggtgctcaatggagaatataaacatatacagaaaaatatatattttaagtttaaaaaacagaaaaacagacaaaacaatccccatcaggtagctgtctaacccccagctgggtctaatccttctcattacccacccgacctggctgcccctcaccttgggctgggggactggggggccatttccttttctctgccctttttttgttgttctattttgtacagacaagttggaaaaacaacagcgacaaaaaagtcaagaaactttgtaaaatatcgtgtgtgtgattccttgtaaaatattttcaaatggtttattacagaagatcagttattaaataatgttcatattttcacttcaaa

SEQ ID NO: 14912 - DNA, 2327 bp, Homo sapiens
acatttcattgtaaacgactgggagtatctgagcaaattatttcttacgtgactttagagaaaacggctacctatctgaccccaaaacgacttgaggaaactgtttccacggtcctgctgcagaggggaagcacagtcgtcaagaagagagtggggtcaggatcaaaacacatttagtgtgacttagggaaagaaaacattttccctctttgaacctctctggatacagtcattttgcctctacttgaggatcaactgttcaacctcaatggcctttcaggacctcctgggtcacgctggtgacctgtggagattccagatccttcagactgtttttctctcaatctttgctgttgctacataccttcattttatgctggagaacttcactgcattcatacctggccatcgctgctgggtccacatcctggacaatgacactgtctctgacaatgacactggggccctcagccaagatgcactcttgagaatctccatcccactggactcaaacatgaggccagagaagtgtcgtcgctttgttcatcctcagtggcagctccttcacctgaatgggaccttccccaacacaagtgacgcagacatggagccctgtgtggatggctgggtgtatgacagaatctccttctcatccaccatcgtgactgagtgggatctggtatgtgactctcaatcactgacttcagtggctaaatttgtattcatggctggaatgatggtgggaggcatcctaggcggtcatttatcagacaggtttgggagaaggttcgtgctcagatggtgttacctccaggttgccattgttggcacctgtgcagccttggctcccaccttcctcatttactgctcactacgcttcttgtctgggattgctgcaatgagcctcataacaaatactattatgttaatagccgagtgggcaacacacagattccaggccatgggaattacattgggaatgtgcccttctggtattgcatttatgaccctggcaggcctggcttttgccattcgagactggcatatcctccagctggtggtgtctgtaccatactttgtgatctttctgacctcaagttggctgctagagtctgctcggtggctcattatcaacaataaaccagaggaaggcttaaaggaacttagaaaagctgcacacaggagtggaatgaagaatgccagagacaccctaaccctggagattttgaaatccaccatgaaaaaagaactggaggcagcacaaaaaaaaaaaccttctctgtgtgaaatgctccacatgcccaacatatgtaaaaggatctccctcctgtcctttacgagatttgcaaactttatggcctattttggccttaatctccatgtccagcatctggggaacaatgttttcctgttgcagactctctttggtgcagtcatcctcctggccaactgtgttgcaccttgggcactgaaatacatgaaccgtcgagcaagccagatgcttctcatgttcctactggcaatctgccttctggccatcatatttgtgccacaagaaatgcagacgctgcgtgaggttttggcaacactgggcttaggagcgtctgctcttgccaatacccttgcttttgcccatggaaatgaagtaattcccaccataatcagggcaagagctatggggatcaatgcaacctttgctaatatagcaggagccctggctcccctcatgatgatcctaagtgtgtattctccacccctgccctggatcatctatggagtcttccccttcatctctggctttgctttcctcctccttcctgaaaccaggaacaagcctctgtttgacaccatccaggatgagaaaaatgagagaaaagaccccagagaaccaaagcaagaggatccgagagtggaagtgacgcagttttaaggaattccaggagctgactgccgatcaatgagccagatgaagggaacaatcaggactattcctagacactagcaaaatctagaaaataaataacaaggctgggtgcggtggctcacgcctgtaatcccagcaccttgggaggctgaggcgggcagatcatgaggtcagaagataaagaccaccctggccaacatggtgaaaccctgtctctactaaaacaaatacaaaacttcgctgggcacagtggcacaggcctttaattccagctacttgggaggctgaggcaggagaattacttgaacccaggaggtggaaattgcaatgagccaagattgggccactgcattccagcctggtgacagagcgagactgtctcaaaaaaaaaaaaaaaaaaaaa

SEQ ID NO: 14913 - DNA, 2395 bp, Homo sapiens
atgtggctcacataaattcagaaagtatgatagcagtgtaggtggttagcagcacctcataaggtccttcctagcaagggatgctaatgactagccaatgctctaggaagacattgagaccagccaacttcttgccttgataactactgaagagacattgggtggctggattttgaaagcagacttctggttataggtgatgcaacttgaaaaacaatcctgaaacatgaaacaagaataataatatttaaatgtaacttaatcattatacctctttatccatcaaagtgaattcattccattccctttcatctgtgctcatactttgcatcagatattgggtaaaccaaagtgtgtaggaagaaataaatgttttcatagtcattactctttacaatgggagtgctaaaattcaagcacatctttttcagaagctttgttaaatcaagtggagtatcccagatagttttcaccttccttctgattccatgttgcttgactctgaatttcagagcacctcctgttattccaaatgtgcctttcctctgggcctggaatgccccaagtgaattttgtcttggaaaatttgatgagccactagatatgagcctcttctctttcataggaagcccccgaataaacgccaccgggcaaggtgttacaatattttatgttgatagacttggctactatccttacatagattcaatcacaggagtaactgtgaatggaggaatcccccagaagatttccttacaagaccatctggacaaagctaagaaagacattacattttatatgccagtagacaatttgggaatggctgttattgactgggaagaatggagacccacttgggcaagaaactggaaacctaaagatgtttacaagaataggtctattgaattggttcagcaacaaaatgtacaacttagtctcacagaggccactgagaaagcaaaacaagaatttgaaaaggcagggaaggatttcctggtagagactataaaattgggaaaattacttcggccaaatcacttgtggggttattatctttttccggattgttacaaccatcactataagaaacccggttacaatggaagttgcttcaatgtagaaataaaaagaaatgatgatctcagctggttgtggaatgaaagcactgctctttacccatccatttatttgaacactcagcagtctcctgtagctgctacactctatgtgcgcaatcgagttcgggaagccatcagagtttccaaaatacctgatgcaaaaagtccacttccggtttttgcatatacccgcatagtttttactgatcaagttttgaaattcctttctcaagatgaacttgtgtatacatttggcgaaactgttgctctgggtgcttctggaattgtaatatggggaaccctcagtataatgcgaagtatgaaatcttgcttgctcctagacaattacatggagactatactgaatccttacataatcaacgtcacactagcagccaaaatgtgtagccaagtgctttgccaggagcaaggagtgtgtataaggaaaaactggaattcaagtgactatcttcacctcaacccagataattttgctattcaacttgagaaaggtggaaagttcacagtacgtggaaaaccgacacttgaagacctggagcaattttctgaaaaattttattgcagctgttatagcaccttgagttgtaaggagaaagctgatgtaaaagacactgatgctgttgatgtgtgtattgctgatggtgtctgtatagatgcttttctaaaacctcccatggagacagaagaacctcaaattttctacaatgcttcaccctccacactatctgccacaatgttcatttggaggctggaagtctgggatcaaggtattagcagaattggtttcttctgagagtcatgagggaaaaatgtgtttcaggcctcttcccttggcttacaggaaatgaaaaaaccatgactatcatcaccaacatccttgggtattaagtgcagtcactctcctagatgctgtggggagaaggcaagttacaaagatagaccttccctcaagataatcagattttcatggtattatccttaacctttttgacatcatggaggctttgggaatctgatgaagcctatcaattttcttccagaagatatttatataagattataagaaaaattatgtacacagcttattttattgcattggatcaaaatgccatttataaagaattatgccttttccatcaattttagcatggaaaaataatttcaggcaatatgcttaaaaattgggggaagacaaaagaaatccatatcgtgtaaataaaaataaattttggttttgctcaaaaaaaaaaaaaaaa

SEQ ID NO: 14914 - DNA, 2009 bp, Homo sapiens
atgtggctcacataaattcagaaagtatgatagcagtgtaggtggttagcagcacctcataaggtccttcctagcaaggcaaagggatgctaatgactagccaatgctctaggaagacattgagaccagccaacttcttgccttgataactactgaagagacattgggtggctggattttgaaagcagacttctggttataggtgatgcaacttgaaaaacaatcctgaaacatgaaacaagaataataatatttaaatgtaacttaatcattatacctctttatccatcaaagtgaattcattccattccctttcatctgtgctcatactttgcatcagatattgggtaaaccaaagtgtgtaggaagaaataaatgttttcatagtcattactctttacaatgggagtgctaaaattcaagcacatctttttcagaagctttgttaaatcaagtggagtatcccagatagttttcaccttccttctgattccatgttgcttgactctgaatttcagagcacctcctgttattccaaatgtgcctttcctctgggcctggaatgccccaagtgaattttgtcttggaaaatttgatgagccactagatatgagcctcttctctttcataggaagcccccgaataaacgccaccgggcaaggtgttacaatattttatgttgatagacttggctactatccttacatagattcaatcacaggagtaactgtgaatggaggaatcccccagaagatttccttacaagaccatctggacaaagctaagaaagacattacattttatatgccagtagacaatttgggaatggctgttattgactgggaagaatggagacccacttgggcaagaaactggaaacctaaagatgtttacaagaataggtctattgaattggttcagcaacaaaatgtacaacttagtctcacagaggccactgagaaagcaaaacaagaatttgaaaaggcagggaaggatttcctggtagagactataaaattgggaaaattacttcggccaaatcacttgtggggttattatctttttccggattgttacaaccatcactataagaaacccggttacaatggaagttgcttcaatgtagaaataaaaagaaatgatgatctcagctggttgtggaatgaaagcactgctctttacccatccatttatttgaacactcagcagtctcctgtagctgctacactctatgtgcgcaatcgagttcgggaagccatcagagtttccaaaatacctgatgcaaaaagtccacttccggtttttgcatatacccgcatagtttttactgatcaagttttgaaattcctttctcaagatgaacttgtgtatacatttggcgaaactgttgctctgggtgcttctggaattgtaatatggggaaccctcagtataatgcgaagtatgaaatcttgcttgctcctagacaattacatggagactatactgaatccttacataatcaacgtcacactagcagccaaaatgtgtagccaagtgctttgccaggagcaaggagtgtgtataaggaaaaactggaattcaagtgactatcttcacctcaacccagataattttgctattcaacttgagaaaggtggaaagttcacagtacgtggaaaaccgacacttgaagacctggagcaattttctgaaaaattttattgcagctgttatagcaccttgagttgtaaggagaaagctgatgtaaaagacactgatgctgttgatgtgtgtattgctgatggtgtctgtatagatgcttttctaaaacctcccatggagacagaagaacctcaaattttctacaatgcttcaccctccacactatctgccacaatgttcattgttagtattttgtttcttatcatttcttctgtagcgagtttgtaattgcgcaggttagctgaaatgaacaatatgtccatcttaaagtgtgctttttcgactaattaaatctttgaaaagaa

SEQ ID NO: 14915 - DNA, 3816 bp, Homo sapiens
ggggtcgcgccgagccgagccgagccgagcggagccggcggagcctctggaatcacccgggtcgctgttcctgaggtggtcaaggtggacagggggcggtggtgatggcgcagtttgacactgaataccagcgcctagaggcctcctatagtgattcacccccaggggaggaggacctgttggtgcacgtcgccgaggggagcaagtcaccttggcaccgtattgaaaaccttgacctcttcttctctcgagtttataatctgcaccagaagaatggcttcacatgtatgctcatcggggagatctttgagctcatgcagttcctctttgtggttgccttcactaccttcctggtcagctgcgtggactatgacatcctatttgccaacaagatggtgaaccacagtcttcaccctactgaacccgtcaaggtcactctgccagacgcctttttgcctgctcaagtctgtagtgccaggattcaggaaaatggctcccttatcaccatcctggtcattgctggtgtcttctggatccaccggcttatcaagttcatctataacatttgctgctactgggagatccactccttctacctgcacgctctgcgcatccctatgtctgcccttccgtattgcacgtggcaagaagtgcaggcccggatcgtgcagacgcagaaggagcaccagatctgcatccacaaacgtgagctgacagaactggacatctaccaccgcatcctccgtttccagaactacatggtggcactggttaacaaatccctcctgcctctgcgcttccgcctgcctggcctcggggaagctgtcttcttcacccgtggtctcaagtacaactttgagctgatcctcttctggggacctggctctctgtttctcaatgaatggagcctcaaggccgagtacaaacgtggggggcaacggctagagctggcccagcgcctcagcaaccgcatcctgtggattggcatcgctaacttcctgccgtgccccctcatcctcatatggcaaatcctctatgccttcttcagctatgctgaggtgctgaagcgggagccgggggccctgggagcacgctgctggtcactctatggccgctgctacctccgccacttcaacgagctggagcacgagctgcagtcccgcctcaaccgtggctacaagcccgcctccaagtacatgaattgcttcttgtcacctcttttgacactgctggccaagaatggagccttcttcgctggctccatcctggctgtgcttattgccctcaccatttatgacgaagatgtgttggctgtggaacatgtgctgaccaccgtcacactcctgggggtcaccgtgaccgtgtgcaggtcctttatcccggaccagcacatggtgttctgccctgagcagctgctccgcgtgatcctcgctcacatccactacatgcctgaccactggcagggtaatgcccaccgctcgcagacccgggacgagtttgcccagctcttccagtacaaggcagtgttcattttggaagagttgttgagccccattgtcacacccctcatcctcatcttctgcctgcgcccacgggccctggagattatagacttcttccgaaacttcaccgtggaggtcgttggtgtgggagatacctgctcctttgctcagatggatgttcgccagcatggtcatccccagtggctatctgctgggcagacagaggcctcagtgtaccagcaagctgaggatggaaagacagagttgtcactcatgcactttgccatcaccaaccctggctggcagccaccacgtgagagcacagccttcctaggcttcctcaaggagcaggttcagcgggatggagcagctgctagcctcgcccaagggggtctgctccctgaaaatgccctctttacgtctatccagtccttacaatctgagtctgagcccctgagccttatcgcaaatgtggtagctggctcatcctgccggggccctccactgcccagagacctgcagggctccaggcacagggctgaagtcgcctctgccctgcgctccttctccccgctgcaacccgggcaggcgcccacaggccgggctcacagcaccatgacaggctctggggtggatgccaggacagccagctccgggagcagcgtgtgggaaggacagctgcagagcctggtgctgtcagaatatgcatccacagagatgagcctgcatgccctctatatgcaccagctccacaagcagcaggcccaggctgaacctgagcggcatgtatggcaccgccgggagagtgatgagagtggagaaagcgcccctgatgaagggggagagggcgcccgggccccccagtctatccctcgctctgctagctatccctgtgtagcaccccggcctggagctcctgagaccaccgccctgcatgggggcttccagaggcgctacggtggcatcacagatcctggcacagtgcccagggttccctctcatttctctcggctgcctcttggagggtgggcagaagatgggcagtcggcatcaaggcaccctgagcccgtgcccgaagagggctcggaggatgagctaccccctcaggtgcacaaggtatagacaaggctgagcagggttcctgtggcccaggatggaggccaccgctgccctgccatcccgtctgcctgccatgggacggctcctctgagtgttccctggccccatgtgtgtggtgtttgtgtgtctgtgcctggccaagggaggtgccaacactgggcttgccacagccccaggagaggaatttggggcctaggaaccgagggcacacgggactctagcctcatccccaggacccccttggctcagagtgtggtgctagaaactggtccccagcccagccccagtactgccacctttacacctacccctgcaagtccccagagggctgcccacgatagaagctgccaagcagggagaacctgtgccaactgtggagtggggaggttgggcctggaccctcaacccctgcaaccttccctagccccctcaatagatgagcaggtcaggctgtggcccttacctcacccgcagttctcgcccagtgctgcagccggctcacctctctccgcttcttgcacatcactggcctgtgtgtgctgcttgctcctgttctgttcgcttgctcccgttccgttcggcttttgctttgcgttagggtgaagaccctagcgtccagctcccctcaacgctatattttgacactaaaaaagaaggtttctaaattgtaggagcaggatggaaatactttgctgcccttgccatcttttaggatgggcccccaggagactgaggtcttcctgggccctcattgctgcttatcgtaccccccatcacctgcacatgggacagaccgggctggagggtgaccttggctgtgtacgtcccagcaaaagagctctggcccgcatctcgctgtgccctgaagggggatgaagggcgatgcctcgcccgaggctttgggctgctgcactgcatgctgggactgctcctactctctgtcccacccctcacccagctgtggtccggctttgggagagtggtgaattgcgctgcccgaactcggagcggagcagggtagggaccgtgtacagcttgataacccttaataaaaagggagtttgaccagaaaaaaaaaaaaaaaaaaaaaaaaaaaaaaaaaaaaaaaaaaaaaaaaaaaaaaaaaaaaaaaaaagaaaaaaaaaaaaaaaaaaagaaaaaaaaaaaaaaaaagaaaaaaaaaaaaaaaaaacct

SEQ ID NO: 14916 - DNA, 3400 bp, Homo sapiens
ggaaccgccgccggtatccgcgtccgcagcgccgccagccaggcgagagccgtgtgggatcccagcgcccgcactcccgcccccgccaaggagccaggaatggcacaactagagaggagcgccatctctggcttcagctctaagtccaggcgaaactcattcgcatatgatgttaagcgtgaagtatacaatgaggagacctttcaacaggaacacaaaaggaaggcctcctcttctgggaacatgaacatcaacatcaccaccttcagacaccacgtccagtgccgctgctcatggcacaggttcctacgatgcgtgcttacaatctttcccttcctagaatggatgtgtatgtatcgattaaaggattggcttctgggagacttacttgctggtataagtgttggccttgtgcaagttccccaaggcctgacacttagtttgctggcaaggcaactgattcctcctctcaacatcgcttatgcagctttctgttcttcggtaatctatgtaatttttggatcgtgtcatcaaatgtccattggttccttcttcctggtgagtgctctgctgatcaacgttctgaaagtgagcccattcaacaacggtcaactggtcatgggatctttcgtcaagaatgagttttcggccccctcctaccttatgggctataataaatccttgagtgtggtggcaaccacaacttttctgactgggattattcagctaataatgggcgtattgggtttgggcttcattgccacttaccttccggagtctgcaatgagtgcttacctggctgctgtggcacttcatatcatgctgtcccagctgactttcatctttgggattatgattagtttccatgccggtcccatctccttcttctatgacataattaattactgtgtagctctcccaaaagcgaattccaccagcattctagtatttctaactgttgttgttgctctgcgaatcaacaaatgtatcagaatttctttcaatcagtatcccattgagtttcccatggaattatttctgattattggcttcactgtgattgcaaacaagataagcatggccacagaaaccagccagacgcttattgacatgattccttatagctttctgcttcctgtaacaccagatttcagccttcttcccaagataattttacaagccttctccttatctttggtgagctcctttctgctcatatttctgggcaagaagattgccagtcttcacaattacagtgtcaattccaaccaggatttaatagccatcggcctttgcaatgtcgtcagttcatttttcagatcttgtgtgtttactggtgctattgctaggactattatccaggataaatctggaggaagacaacagtttgcatctctggtaggcgcaggtgtgatgctgctcctgatggtgaagatgggacactttttctacacactgccaaatgctgtgctggctggtattattctgagcaacgtcattccctaccttgaaaccatttctaacctacccagcctgtggaggcaggaccaatatgactgtgctctttggatgatgacattctcatcttcaattttcctgggactggacattggactaattatctcagtagtttctgctttcttcatcaccactgttcgttcacacagagctaagattcttctcctgggtcaaatccctaacaccaacatttatagaagcatcaatgattatcgggagatcatcaccattcctggggtgaaaatcttccagtgctgcagctcaattacatttgtaaatgtttactacctaaagcataagctgttaaaagaggttgatatggtaaaggtgcctcttaaagaagaagaaattttcagcttgtttaattcaagtgacaccaatctacaaggaggaaagatttgcaggtgtttctgcaactgtgatgatctggagccgctgcccaggattctttacacagagcgatttgaaaataaactggatcccgaagcatcctccattaacctgattcactgctcacattttgagagcatgaacacaagccaaactgcatccgaagaccaagtgccatacacagtatcgtccgtgtctcagaaaaatcaagggcaacagtatgaggaggtggaggaagtttggcttcctaataactcatcaagaaacagctcaccaggactgcctgatgtggcggaaagccaggggaggagatcactcatcccttactcagatgcgtctctactgcccagtgtccacaccatcatcctggatttctccatggtacactacgtggattcacgggggttagtcgtattaagacagatatgcaatgcctttcaaaacgccaacattttgatactcattgcagggtgtcactcttccatagtcagggcatttgagaggaatgatttctttgacgctggcatcaccaagacccagctgttcctcagcgttcacgacgccgtgctgtttgccttgtcaaggaaggtcataggctcctctgagttaagcatcgatgaatccgagacagtgatacgggaaacctactcagaaacagacaagaatgacaattcaagatataaaatgagcagcagttttctaggaagccaaaaaaatgtaagtccaggcttcatcaagatccaacagcctgtagaagaggagtcggagttggatttggagctggaatcagaacaagaggctgggctgggtctggacctagacctggatcgggagctggagcctgaaatggagcccaaggctgagaccgagaccaagacccagaccgagatggagccccagcctgagactgagcctgagatggagcccaaccccaaatctaggccaagagctcacacttttcctcagcagcgttactggcctatgtatcatccgtctatggcttccacccagtctcagactcagactcggacatggtcagtggagaggagacgccatcctatggattcatactcaccagagggcaacagcaatgaagatgtctaggagatgaactagaaataaggggtcagataatgctggcaaatcctcctacccaaaaaggggtcaattgtccagagacctagactggatacgaactagcagtacttccttcctgactgtgactcctactacctgccagccttcttccttgctctgcgctgggatcatactcccaaatcacattactaaatgccaacaattatctctgaattccctatccaggctcccctcatttcaccttcagcatatattctagtcatgaatttccttcttcacacaccccacatctctgggctttgtgccagaccatctctaacttaatcctctcatccctgttcccctttctccaaagagatgaagctcaaataaaatgtataactctagtaaaaaa

SEQ ID NO: 14917 - DNA, 3159 bp, Homo sapiens
gctgggagacgcctgggcgccgggggctgcaggtcccagggcgggggctgcgtccgtcaccggcaggtacccaggtatgccgcagagccaggcacgccgtgggcactcagtcagtatctgtggaatgaatgaatgatggtcgtccctgggagcttatctctgaggaatggcacaactagagaggagcgccatctctggcttcagctctaagtccaggcgaaactcattcgcatatgatgttaagcgtgaagtatacaatgaggagacctttcaacaggaacacaaaaggaaggcctcctcttctgggaacatgaacatcaacatcaccaccttcagacaccacgtccagtgccgctgctcatggcacaggttcctacgatgcatgcttacaatctttcccttcctagaatggatgtgtatgtatcgattaaaggattggcttctgggagacttacttgctggtataagtgttggccttgtgcaagttccccaaggcctgacacttagtttgctggcaaggcaactgattcctcctctcaacatcgcttatgcagctttctgttcttcggtaatctatgtaatttttggatcgtgtcatcaaatgtccattggttccttcttcctggtgagtgctctgctgatcaacgttctgaaagtgagcccattcaacaacggtcaactggtcatgggatctttcgtcaagaatgagttttcggccccctcctaccttatgggctataataaatccttgagtgtggtggcaaccacaacttttctgactgggattattcagattattggcttcactgtgattgcaaacaagataagcatggccacagaaaccagccagacgcttattgacatgattccttatagctttctgcttcctgtaacaccagatttcagccttcttcccaagataattttacaagccttctccttatctttggtgagctcctttctgctcatatttctgggcaagaagattgccagtcttcacaattacagtgtcaattccaaccaggatttaatagccatcggcctttgcaatgtcgtcagttcatttttcagatcttgtgtgtttactggtgctattgctaggactattatccaggataaatctggaggaagacaacagtttgcatctctggtaggcgcaggtgtgatgctgctcctgatggtgaagatgggacactttttctacacactgccaaatgctgtgctggctggtattattctgagcaacgtcattccctaccttgaaaccatttctaacctacccagcctgtggaggcaggaccaatatgactgtgctctttggatgatgacattctcatcttcaattttcctgggactggacattggactaattatctcagtagtttctgctttcttcatcaccactgttcgttcacacagagctaagattcttctcctgggtcaaatccctaacaccaacatttatagaagcatcaatgattatcgggagatcatcaccattcctggggtgaaaatcttccagtgctgcagctcaattacatttgtaaatgtttactacctaaagcataagctgttaaaagaggttgatatggtaaaggtgcctcttaaagaagaagaaattttcagcttgtttaattcaagtgacaccaatctacaaggaggaaagatttgcaggtgtttctgcaactgtgatgatctggagccgctgcccaggattctttacacagagcgatttgaaaataaactggatcccgaagcatcctccattaacctgattcactgctcacattttgagagcatgaacacaagccaaactgcatccgaagaccaagtgccatacacagtatcgtccgtgtctcagaaaaatcaagggcaacagtatgaggaggtggaggaagtttggcttcctaataactcatcaagaaacagctcaccaggactgcctgatgtggcggaaagccaggggaggagatcactcatcccttactcagatgcgtctctactgcccagtgtccacaccatcatcctggatttctccatggtacactacgtggattcacgggggttagtcgtattaagacagatatgcaatgcctttcaaaacgccaacattttgatactcattgcagggtgtcactcttccatagtcagggcatttgagaggaatgatttctttgacgctggcatcaccaagacccagctgttcctcagcgttcacgacgccgtgctgtttgccttgtcaaggaaggtcataggctcctctgagttaagcatcgatgaatccgagacagtgatacgggaaacctactcagaaacagacaagaatgacaattcaagatataaaatgagcagcagttttctaggaagccaaaaaaatgtaagtccaggcttcatcaagatccaacagcctgtagaagaggagtcggagttggatttggagctggaatcagaacaagaggctgggctgggtctggacctagacctggatcgggagctggagcctgaaatggagcccaaggctgagaccgagaccaagacccagaccgagatggagccccagcctgagactgagcctgagatggagcccaaccccaaatctaggccaagagctcacacttttcctcagcagcgttactggcctatgtatcatccgtctatggcttccacccagtctcagactcagactcggacatggtcagtggagaggagacgccatcctatggattcatactcaccagagggcaacagcaatgaagatgtctaggagatgaactagaaataaggggtcagataatgctggcaaatcctcctacccaaaaaggggtcaattgtccagagacctagactggatacgaactagcagtacttccttcctgactgtgactcctactacctgccagccttcttccttgctctgcgctgggatcatactcccaaatcacattactaaatgccaacaattatctctgaattccctatccaggctcccctcatttcaccttcagcatatattctagtcatgaatttccttcttcacacaccccacatctctgggctttgtgccagaccatctctaacttaatcctctcatccctgttcccctttctccaaagagatgaagctcaaataaaatgtataactctaaaaaaaaaaaaaaaa

SEQ ID NO: 14918 - protein, 15 aa, Homo sapiens
LCPDCPLLAPLDDSR
